(19) United States
(12) Patent Application Publication
(10) Pub. No.: US 2023/0407243 A1
(43) Pub. Date: Dec. 21, 2023

(54) GENETIC PLATFORM TO INVESTIGATE THE FUNCTIONS OF BACTERIAL DRUG EFFLUX PUMPS

(71) Applicant: University of Guelph, Guelph (CA)

(72) Inventors: Georgina Cox, Guelph (CA); Tanisha Teelucksingh, Brampton (CA); Laura Thompson, Guelph (CA)

(21) Appl. No.: 18/210,416

(22) Filed: Jun. 15, 2023

Related U.S. Application Data
(60) Provisional application No. 63/352,569, filed on Jun. 15, 2022.

(51) Int. Cl. C12N 1/20; C12N 15/01

(52) U.S. Cl. CPC C12N 1/205; C12N 15/01; C12R 2001/19

(57) ABSTRACT

The present disclosure provides an Escherichia coli strain comprising at least 20 of inactivated genes from acrB, acrD, acrF, mdtF, macB, emrB, mdtL, mdtK, bcr, ydeA, mdtM, yddA, yebQ, emrE, mdtD, sugE, ynfM, emrD, ydeF, mdtJ, ydiM, mdtB, mdlA, emrY, mdfA, fsr, mdtG, mdtH, yieO, mdlB, mdtO, yojI, yajR, ydhC, and cusA. Also provided is a method for identifying a compound that is an antibacterial agent using an Escherichia coli strain disclosed herein. Further provided is a method for creating an Escherichia coli strain with one active efflux pump.

### CROSS REFERENCE TO RELATED APPLICATION

[0001] The present disclosure claims priority from U.S. provisional application No. 63/352,569 filed on Jun. 15, 2022, which is hereby incorporated by reference in its entirety.

### INCORPORATION OF SEQUENCE LISTING

[0002] A computer readable form of the Sequence Listing “6580-P68227US01_SequenceListing.xml” (5,017,998 bytes), submitted via Patent Center and created on Aug. 4, 2023, is herein incorporated by reference.

### FIELD

[0003] The present disclosure provides an Escherichia coli strain comprising inactivated genes acrB, acrD, acrF, mdtF, macB, emrB, mdtL, mdtK, bcr, ydeA, mdtM, yddA, yebQ, emrE, mdtD, sugE, ynfM, emrD, ydeF, mdtJ, ydiM, mdtB, mdlA, emrY, mdfA, fsr, mdtG, mdtH, yieO, mdlB, mdtO, yojI, yajR, ydhC, and cusA. Also provided is a method for identifying a compound that is an antibacterial agent using an Escherichia coli strain disclosed herein. Further provided is a method for creating an Escherichia coli strain with one active efflux pump.

### BACKGROUND

[0004] Gram-negative bacteria represent a serious challenge for antibacterial drug discovery efforts. The outer membrane (OM) is a formidable barrier for the entry of large and hydrophobic compounds, and the inner membrane (IM) reduces the influx of hydrophilic drugs. These two membranes augment the next line of defense, membrane-spanning efflux pumps, which effectively reduce the intracellular and periplasmic concentrations of compounds that have penetrated the cell. Synergy between influx retardation and active efflux contributes considerably to the intrinsic antibiotic resistome of Gram-negative pathogens.

[0005] Multidrug-resistance (MDR) efflux pumps, which typically extrude a wide range of structurally unrelated substances, have been particularly well studied. However, bacterial species harbor large networks of additional and often poorly characterized drug efflux pumps. For example, sequence annotation of the Escherichia coli K-12 genome highlighted the presence of 36 known or putative drug efflux pumps, which span five protein families: the ATP-binding cassette (ABC) superfamily, the resistance-nodulation-cell division (RND) superfamily, the major facilitator superfamily (MFS), the small multidrug resistance family (SMR), and the multi-antimicrobial extrusion (MATE) family. E. coli efflux pumps within the RND and ABC superfamilies complex with periplasmic adaptor proteins and the OM channel TolC. These tripartite complexes span the entire cell envelope. Certain MFS pumps, such as EmrB and EmrY, also form tripartite complexes with TolC. However, a majority of MFS members are single component pumps that extrude substrates to the periplasm. Efflux pumps from the MATE and SMR families are also single component efflux pumps. In the case of antibiotics with cytoplasmic targets, synergistic relationships are thought to exist between tripartite systems and single component IM pumps. In this instance, single component pumps extrude substrates to the periplasm, and tripartite assemblies then efflux to the exterior of the cell, which is often referred to as functional ‘interplay’.

[0006] Since efflux pumps are a major contributor to antibiotic resistance, delineating the substrate specificities and functions of these membrane-spanning proteins is critical for the development of strategies to compromise and/or circumvent these ancient resistance elements. In addition, while efflux pumps have largely been studied for their ability to extrude most classes of clinically important antibiotics, they are also increasingly associated with physiological functions. Indeed, conservation of the E. coli efflux system further supports such physiological functions. However, important questions remain regarding the physiological roles of these proteins. Overall, a major limitation hindering the study of bacterial efflux pumps has been the lack of a suitable genetic background. It is difficult to delineate the substrate specificities and functions of each pump due to the sheer number encoded within the genome, the differential expression of efflux pump-encoding genes, and functional redundancies. For example, in terms of functional redundancy, E. coli K-12 strains harbor six pumps that efflux tetracycline, which is proposed to provide a more robust and flexible defense mechanism.

### SUMMARY

[0007] To address these limitations, inventors generated and thoroughly characterized an extensively efflux-deficient mutant strain of E. coli. This strain provides a simplified genetic background free of the masking effects and redundancies of promiscuous efflux pumps. While a growing body of literature associates drug efflux pumps with important physiological processes, which suggests their removal could be detrimental or infeasible, inventors successfully inactivated 35 IM efflux pumps comprising the E. coli drug efflux network, generating Efflux KnockOut-35 (EKO-35). Phenotypic profiling of this strain revealed the E. coli drug efflux network is dispensable under optimal growth conditions, with little impact on the cellular proteome in nutrient-rich conditions. Importantly, when EKO-35 is propagated under diverse growth conditions, inventors reveal distinct patterns of dispensability, which opens the way for future studies to investigate the efflux pumps responsible for these conditionally essential phenotypes. To the best of inventors' knowledge, EKO-35 represents the most efflux-deficient bacterial mutant to be reported.

[0008] In addition to the important biological insight gained through generation of EKO-35, this strain can also be used as a well-characterized simplified genetic background to study the functions of efflux pumps of interest. To demonstrate the utility of EKO-35, inventors constructed an efflux platform consisting of EKO-35 genomic integrations of genes encoding E. coli efflux pumps forming tripartite complexes with the OM channel TolC. Each strain was profiled against a curated collection of physicochemically diverse compounds, which enabled the inventors to summarize molecular properties contributing to transport in each of these proteins. Inventors also profiled the MexCD pump from Pseudomonas aeruginosa, showing that the platform can be used to study efflux pumps from other organisms. Through the introduction of a large non-selective pore into the OM of EKO-35 (EKO-35-Pore), inventors demonstrate the efflux platform can be additionally utilized to study the specificity of efflux pump inhibitors, and to explore efflux pump interplay. Overall, EKO-35, the developed efflux platform, and the important insight gained into physicochemical substrate specificities and efflux essentiality, will have widespread application for the study of bacterial drug efflux pumps.

[0009] Accordingly, provided herein is an Escherichia coli strain comprising at least 20 of inactivated genes acrB, acrD, acrF, mdtF, macB, emrB, mdtL, mdtK, bcr, ydeA, mdtM, yddA, yebQ, emrE, mdtD, sugE, ynfM, emrD, ydeF, mdtJ, ydiM, mdtB, mdlA, emrY, mdfA, fsr, mdtG, mdtH, yieO, mdlB, mdtO, yojI, yajR, ydhC, and cusA.

[0010] In some embodiments, the strain comprises at least 25, at least 30 or more of the inactivated genes. In some embodiments, the strain comprises at least 34 of the inactivated genes. In some embodiments, strain comprises all 35 inactivated genes. In some embodiments, the Escherichia coli strain is deposited under International Depositary Authority of Canada (IDAC) accession number 310522-01 deposited on May 31, 2022, or IDAC accession number 070623-01 deposited on Jun. 7, 2023. In some embodiments, the Escherichia coli comprises a nucleic acid having the sequence as shown in SEQ ID NO: 255. In some embodiments, the strain further comprises an open variant of outer membrane ferric siderophore transporter FhuA. In some embodiments, the strain comprises at least one of reactivated acrB, acrD, acrF, mdtF, macB, emrB, mdtL, mdtK, bcr, ydeA, mdtM, yddA, yebQ, emrE, mdtD, sugE, ynfM, emrD, ydeF, mdtJ, ydiM, mdtB, mdlA, emrY, mdfA, fsr, mdtG, mdtH, yieO, mdlB, mdtO, yojI, yajR, ydhC, and cusA, optionally under the control of a constitutive promoter. In some embodiments, one of acrB, acrD, acrF, mdtF, macB, emrB, mdtL, mdtK, bcr, ydeA, mdtM, yddA, yebQ, emrE, mdtD, sugE, ynfM, emrD, ydeF, mdtJ, ydiM, mdtB, mdlA, emrY, mdfA, fsr, mdtG, mdtH, yieO, mdlB, mdtO, yojI, yajR, ydhC, and cusA, is reactivated. In some embodiments, the inactivation comprises deletion of the gene, or introducing a mutation into the gene to ablate expression of the gene or eliminate efflux pump activity of the protein expressed by the gene. In some embodiments, acrB, acrD, acrF, mdtF, macB, emrB, mdtL, mdtK, bcr, ydeA, mdtM, yddA, yebQ, emrE, mdtD, sugE, ynfM, emrD, ydeF, mdtJ, ydiM, mdtB, mdlA, emrY, mdfA, fsr, mdtG, mdtH, yieO, mdlB, mdtO, yojI, yajR, ydhC, and cusA are genes encoding for efflux pumps. In some embodiments, the strain comprising at least 20 of inactivated genes acrB, acrD, acrF, mdtF, macB, emrB, mdtL, mdtK, bcr, ydeA, mdtM, yddA, yebQ, emrE, mdtD, sugE, ynfM, emrD, ydeF, mdtJ, ydiM, mdtB, mdlA, emrY, mdfA, fsr, mdtG, mdtH, yieO, mdlB, mdtO, yojI, yajR, ydhC, and cusA is an efflux pump deficient strain. In some embodiments, the strain comprises all 35 inactivated genes is EKO-35.

[0011] Also provided is a method for identifying a compound that is an antibacterial agent, comprising
[0012] (a) i) contacting the compound with the Escherichia coli strain described herein and with wild-type Escherichia coli; and/or
[0013] ii) contacting the compound with the Escherichia coli strain described herein having reactivated genes and EKO-35; and/or
[0014] iii) contacting the compound with the Escherichia coli strain described herein having reactivated genes and an efflux pump deficiency strain described herein; and
[0015] (b) detecting viability of each of the Escherichia coli;
[0016] wherein the compound is identified as an antibacterial agent if the compound decreases viability of wild-type less than the Escherichia coli strain with efflux pump deficiency described herein;
[0017] optionally wherein the compound is identified as an antibacterial agent if the compound decreases viability of the Escherichia coli strain having reactivated efflux pump genes less than the Escherichia coli strain having at least 20 inactivated efflux pump genes;
[0018] optionally wherein the compound is identified as an antibacterial agent if the wild-type Escherichia coli or the Escherichia coli strain having reactivated efflux pump genes is resistant to the compound, and the compound decreases the viability of the Escherichia coli strain having at least 20 inactivated efflux pump genes.

[0019] In some embodiments, the decrease in viability of wild-type or the Escherichia coli strain described herein after contacting the compound is at most 10%, 20%, 30%, 40%, 50%, 60%, 70%, or 80%, or at least 20%, 30%, 40%, 50%, 60%, 70%, 80%, 90%, or 100%.

[0020] In some embodiments, the compound is identified as an antibacterial agent if the compound decreases the viability of efflux pump deficient Escherichia coli strain described herein at a faster rate than the decrease in viability of wild-type or the Escherichia coli strain comprising reactivated efflux pump genes.

[0021] In some embodiments, the compound decreases the viability of the Escherichia coli strain with one reactivated gene in EKO-35 is less than an efflux deficient strain disclosed herein, optionally Escherichia coli strain EKO-35, thereby identifying specificity of the compound for an efflux pump encoded by the reactivated gene, optionally the compound has a lower minimum inhibitory concentration (MIC) in the Escherichia coli strain of EKO-35 than EKO-35 with a reactivated efflux pump.

[0022] In some embodiments, the contacting comprises the Escherichia coli in a suitable culturing media for optimal Escherichia coli growth. In some embodiments, the contacting comprises incubating the Escherichia coli in nutrient-limiting culturing media. In some embodiments, the contacting comprises incubating the Escherichia coli for at least 24 h, 48 h, 72 h, or 96 h. In some embodiments, the culturing media is a media having a pH of about 2, about 3, about 4, or about 5.

[0023] Also provided is a method for creating an Escherichia coli strain producing one or more efflux pump, comprising reactivating one of acrB, acrD, acrF, mdtF, macB, emrB, mdtL, mdtK, bcr, ydeA, mdtM, yddA, yebQ, emrE, mdtD, sugE, ynfM, emrD, ydeF, mdtJ, ydiM, mdtB, mdlA, emrY, mdfA, fsr, mdtG, mdtH, yieO, mdlB, mdtO, yojI, yajR, ydhC, and cusA in an efflux deficient strain disclosed herein, optionally Escherichia coli strain EKO-35.

[0024] In some embodiments, the reactivation comprises introducing one or more of acrB, acrD, acrF, mdtF, macB, emrB, mdtL, mdtK, bcr, ydeA, mdtM, yddA, yebQ, emrE, mdtD, sugE, ynfM, emrD, ydeF, mdtJ, ydiM, mdtB, mdlA, emrY, mdfA, fsr, mdtG, mdtH, yieO, mdlB, mdtO, yojI, yajR, ydhC, and cusA, optionally by reversing the inactivation, optionally by re-introducing the gene back in genome with the same promoter or a different promoter, at the same locus or a different locus, optionally by introducing a knock down-resistant version of the gene.

[0025] Other features and advantages of the present disclosure will become apparent from the following detailed description. It should be understood, however, that the detailed description and the specific Examples while indicating preferred embodiments of the disclosure are given by way of illustration only, since various changes and modifications within the spirit and scope of the disclosure will become apparent to those skilled in the art from this detailed description.

### BRIEF DESCRIPTION OF THE DRAWINGS

[0026] Embodiments are described below in relation to the drawings in which:

[0027] FIG. 1A shows characterization of EKO-35 in Lysogeny broth (LB) at 37° C. FIG. 1A shows Western blot analysis of AcrB in the membranes of the E. coli K-12 wild-type and EKO-35 strains. AcrB and the AcrB_{D408A} mutant were produced in equivalent amounts when the genes were integrated into the arabinose operon (araC) of EKO-35, with gene expression under the control of the constitutive P_{LacI} promoter. AcrB band intensity was normalized to total protein using stain-free gels. Data represent mean values±s.d. of three independent biological replicates. P-values were calculated using a two-tailed Student's t-test (***P<0.001 and ****P<0.0001).

[0028] FIG. 1B shows characterization of EKO-35 in Lysogeny broth (LB) at 37° C. Measurement of EKO-35 growth kinetics revealed a marginal increase in the lag phase and generation time relative to the wild-type strain, which was assessed using three biological replicates (see Table 1).

[0029] FIG. 1C shows characterization of EKO-35 in Lysogeny broth (LB) at 37° C. Measuring the length of 50 cells of the wild-type K-12 and EKO-35 strains revealed no significant changes in cell length or morphology.

[0030] FIG. 1D shows characterization of the wild-type strain in Lysogeny broth (LB) at 37° C. FIG. 1D shows scanning electron microscopy of the wild-type strain during the mid-exponential phase of growth.

[0031] FIG. 1E shows characterization of EKO-35 in Lysogeny broth (LB) at 37° C. FIG. 1E shows scanning electron microscopy of EKO-35 during the mid-exponential phase of growth.

[0032] FIG. 1F shows characterization of EKO-35 in Lysogeny broth (LB) at 37° C. Principal component analysis revealed separation between the proteomes of EKO-35 (gray) and the wild-type strain (black) (Component 1, 40.6%), and slight biological variation (Component 2, 17.2%).

[0033] FIG. 1G shows characterization of EKO-35 in Lysogeny broth (LB) at 37° C. FIG. 1G shows volcano plot depicting significant changes in protein abundance in EKO-35 (gray), relative to the wild-type (black) strain's proteome. Statistical analysis was performed with four biological replicates using a Student's t-test (P-value 0.05, false discovery rate=0.05, S0=1).

[0034] FIG. 1H shows characterization of EKO-35 in Lysogeny broth (LB) at 37° C. FIG. 1H shows 1D-annotation enrichment of Uniprot Keywords enriched in EKO-35, relative to wild-type K-12 for proteins that were significantly (Student t-test, P-value false discovery rate=0.05) differentially abundant between wild-type and EKO-35.

[0035] FIG. 2A shows characterization of EKO-35 under nutrient-limitation at 37° C. The growth of EKO-35 was marginally impacted in M9 minimal glucose medium (see Table 1 for growth kinetics), which was assessed using three biological replicates. The strain entered the exponential phase of growth ˜5 h later than the wild-type strain.

[0036] FIG. 2B shows characterization of EKO-35 under nutrient-limitation at 37° C. Measuring the length of 50 cells of two biological replicates revealed EKO-35 cells were significantly longer under nutrient-limitation. P-values were calculated using a two-tailed Student's t-test (****P<0.0001).

[0037] FIG. 2C shows characterization of EKO-35 under nutrient-limitation at 37° C. FIG. 2C shows scanning electron microscopy of the wild-type strain during the mid-exponential phase of growth.

[0038] FIG. 2D shows characterization of EKO-35 under nutrient-limitation at 37° C. FIG. 2D shows scanning electron microscopy of EKO-35 during the mid-exponential phase of growth.

[0039] FIG. 2E shows characterization of EKO-35 under nutrient-limitation at 37° C. The growth of EKO-35 was not restored in amino acid-limited MOPS medium supplemented with iron, as determined using three biological replicates (see Table 1 for growth kinetics).

[0040] FIG. 2F shows characterization of EKO-35 under nutrient-limitation at 37° C. Principal component analysis separated EKO-35 (gray) from the wild-type (black) proteome (Component 1, 53.2%), and revealed slight biological variation (Component 2, 14%).

[0041] FIG. 2G shows characterization of EKO-35 under nutrient-limitation at 37° C. FIG. 2G shows 1 D-annotation enrichment of Uniprot Keywords enriched in EKO-35, relative to wild-type K-12 for proteins that exhibited significantly (Student t-test, P-value 0.05, false discovery rate=0.05) changes in abundance between wild-type and EKO-35.

[0042] FIG. 2H shows characterization of EKO-35 under nutrient-limitation at 37° C. FIG. 2H shows volcano plot illustrating significant changes in protein abundance of EKO-35 (gray), relative to the wild-type (black) strain. Statistical analysis was performed with four biological replicates using a Student's t-test (P-value 0.05, false discovery rate=0.05, S0=1).

[0043] FIG. 3A shows that the E. coli efflux system is contextually essential. FIG. 3A shows growth of the wild-type (K-12), EKO-35, ΔtolC, and EKO-35 araC::acrB strains in nutrient-rich medium under extreme acid and alkaline conditions. Data represent mean values±s.d. of three independent biological end-point readings after 18 h of growth. P-values were calculated by a two-tailed Student's t-test (****P<0.0001).

[0044] FIG. 3B shows that the E. coli efflux system is contextually essential. EKO-35 and EKO-35 araC::acrB_{D408A} show a significant increase in biofilm formation in nutrient-rich (P=3.61×10⁻⁵ and P=3.52×10⁻⁸, respectively) conditions. Data represents mean values±the s.d. for six biological replicates (nutrient-rich) and three biological replicates (nutrient-limited).

[0045] FIG. 3C shows that the E. coli efflux system is contextually essential. EKO-35 and EKO-35 araC::acrB_{D408A} show a significant increase in biofilm formation in nutrient-limited conditions (P=8.88×10⁻⁷ and P=6.23×10⁻⁷, respectively). Data represents mean values±the s.d. for six biological replicates (nutrient-rich) and three biological replicates (nutrient-limited).

[0046] FIG. 3D shows that the E. coli efflux system is contextually essential. Measurement of EKO-35 growth kinetics (Table 1) revealed a marginally extended lag phase in nutrient-rich medium (P=1.16×10⁻⁶).

[0047] FIG. 3E shows that the E. coli efflux system is contextually essential. Measurement of EKO-35 growth kinetics (Table 1) revealed no significant differences in nutrient-limited medium (P=0.187) at 25° C.

[0048] FIG. 3F shows that the E. coli efflux system is contextually essential. Under low oxygen (1%) conditions, in nutrient-rich medium, EKO-35 growth kinetics revealed significant changes (P=1.51×10⁻⁴) compared to the wild-type strain.

[0049] FIG. 3G shows that the E. coli efflux system is contextually essential. Supplementation of the nutrient-rich medium with 10 mM KNO₃ further impacted EKO-fitness (P=2.02×10⁻⁴) compared to the wild-type strain, which was partially restored through expression of mdtEF (EKO-35 araC::mdtEF) (P=5.09×10⁻⁴).

[0050] FIG. 3H shows that the E. coli efflux system is contextually essential. The E. coli drug efflux system is essential for growth in nutrient-limited, low oxygen (5%) conditions. Expression of mdtEF in EKO-35 (EKO-35 araC::mdtEF) marginally restored fitness, exhibiting a significantly improved generation time (P=6.09×10⁻⁴) compared to EKO-35. All P-values were calculated using a two-tailed Student's t-test (*P<0.05, **P<0.01, ***P<0.001, ****P<0.0001). Growth kinetic statistics are shown in Table 1.

[0051] FIG. 4A shows EKO-35 and the efflux platform enabled summation of efflux substrate physicochemical properties. Minimum inhibitory concentration (MIC) assays were conducted for 52 compounds against non-porinated (−) and porinated (+) wild-type K-12, ΔtolC, and EKO-35 (see Table 10). Compounds that increased the resistance of at least one EKO-35 integrated strain by ≥4-fold are shown in the heat map. Strains were assessed in technical duplicate. MIC values of wild-type K-12, ΔtolC, and EKO-35+/−the pore were log 2 transformed and normalized to 100% for each compound tested, where dark gray on the heat map represents the highest MIC value and white represents the lowest MIC value (see key).

[0052] FIG. 4B shows EKO-35 and the efflux platform enabled summation of efflux substrate physicochemical properties. FIG. 4B shows MIC assays for 52 compounds against 10 strains of non-porinated (−) and porinated (+) EKO-35 with chromosomally integrated efflux genes (see Tables 13A and 13B, and 14). Fold changes in MIC values of each strain compared to EKO-35+/−the pore were log 2 transformed and normalized to 100% for each compound (see Tables 15A, 15B, 16A, and 16B). Dark gray on the heat map indicates the greatest fold change, and white indicates the lowest fold change (see key). Slashes represent 2-fold increases in MIC value, which falls within the acceptable error range and were not considered significant. Box plots show individual data points representing substrate compounds and the corresponding property value, with the center line indicating the median, and whiskers the minimum and maximum values. Physicochemical substrate ranges are also summarized in Table 17. Abbreviations: RIF, rifampicin; VAN, vancomycin; FOF, fosfomycin; AMP, ampicillin; OXA, oxacillin; CHL, chloramphenicol; PURO, puromycin; AZM, azithromycin; ERY, erythromycin; TET, tetracycline; LZD, linezolid; MIN, minocycline; FA, fusidic acid; CIP, ciprofloxacin; NOR, norfloxacin; NAL, nalidixic acid; NOV, novobiocin; TMP, trimethoprim; DXR, doxorubicins DNR, daunorubicin; EtBr, ethidium bromide; ACF, acriflavine; BZK, benzalkonium chloride; DC, deoxycholate; STDC, sodium taurodeoxycholate.

[0053] FIG. 4C shows EKO-35 and the efflux platform enabled summation of efflux substrate physicochemical properties. Molecular weight (MW) for each compound was calculated using DataWarrior (Version 5.5.0). Box plots show individual data points representing substrate compounds and the corresponding property value, with the center line indicating the median, and whiskers the minimum and maximum values. Physicochemical substrate ranges are also summarized in Table 17.

[0054] FIG. 4D shows EKO-35 and the efflux platform enabled summation of efflux substrate physicochemical properties. Lipophilicity (log P) for each compound was calculated using DataWarrior (Version 5.5.0). Box plots show individual data points representing substrate compounds and the corresponding property value, with the center line indicating the median, and whiskers the minimum and maximum values. Physicochemical substrate ranges are also summarized in Table 17.

[0055] FIG. 4E shows EKO-35 and the efflux platform enabled summation of efflux substrate physicochemical properties. Aqueous solubility (log S) for each compound was calculated using DataWarrior (Version 5.5.0). Box plots show individual data points representing substrate compounds and the corresponding property value, with the center line indicating the median, and whiskers the minimum and maximum values. Physicochemical substrate ranges are also summarized in Table 17.

[0056] FIG. 4F shows EKO-35 and the efflux platform enabled summation of efflux substrate physicochemical properties. Polar Surface Area (PSA) for each compound was calculated using DataWarrior (Version 5.5.0). Box plots show individual data points representing substrate compounds and the corresponding property value, with the center line indicating the median, and whiskers the minimum and maximum values. Physicochemical substrate ranges are also summarized in Table 17.

[0057] FIG. 5A shows EKO-35 and the efflux platform can be used to assess efflux pump inhibitor specificities and efflux pump interplay. FIG. 5A shows bar charts depicting fractional inhibitory concentration index (FICI) values of phenylalanine-arginine-β-naphthylamide (PAβN) in combination with oxacillin and novobiocin. The FICI represents the ΣFIC of each drug. The FIC for each drug was determined by dividing the MIC of each drug in combination, by the MIC of each drug alone. ΣFIC=FIC_{A}+FIC_{B}=(C_{A}/MIC_{A})+(C_{B}/MIC_{B}). Synergy (FICI<0.5), additive (FICI>0.5-1.0), indifferent (FICI>1.0-2.0), and antagonistic (FICI>2.0), as highlighted on each bar chart. Related to Tables 18A, 18B, 19A and 19B.

[0058] FIG. 5B shows EKO-35 and the efflux platform can be used to assess efflux pump inhibitor specificities and efflux pump interplay. FIG. 5B shows bar charts depicting fractional inhibitory concentration index (FICI) values of phenylalanine-arginine-8-naphthylamide (PAβN) in combination with fusidic acid and ciprofloxacin. The FICI represents the ΣFIC of each drug. The FIC for each drug was determined by dividing the MIC of each drug in combination, by the MIC of each drug alone. ΣFIC=FIC_{A}+FIC_{B}=(C_{A}/MIC_{A})+(C_{B}/MIC_{B}). Synergy (FICI<0.5), additive (FICI>0.5-1.0), indifferent (FICI>1.0-2.0), and antagonistic (FICI>2.0), as highlighted on each bar chart. Related to Tables 18A, 18B, 19A and 19B.

[0059] FIG. 5C shows EKO-35 and the efflux platform can be used to assess efflux pump inhibitor specificities and efflux pump interplay. FIG. 5C shows bar charts depicting fractional inhibitory concentration index (FICI) values of phenylalanine-arginine-β-naphthylamide (PAM) in combination with erythromycin and linezolid. The FICI represents the ΣFIC of each drug. The FIC for each drug was determined by dividing the MIC of each drug in combination, by the MIC of each drug alone. ΣFIC=FIC_{A}+FIC_{B}=(C_{A}/MIC_{A})+(C_{B}/MIC_{B}). Synergy (FICI<0.5), additive (FICI>0.5-1.0), indifferent (FICI>1.0-2.0), and antagonistic (FICI>2.0), as highlighted on each bar chart. Related to Tables 18A, 18B, 19A and 19B.

[0060] FIG. 5D shows EKO-35 and the efflux platform can be used to assess efflux pump inhibitor specificities and efflux pump interplay. Bar charts depicting fractional inhibitory concentration index (FICI) values of 1-(1-naphthylmethyl)-piperazine (NMP) in combination with oxacillin and ethidium bromide. The FICI represents the ΣFIC of each drug. The FIC for each drug was determined by dividing the MIC of each drug in combination, by the MIC of each drug alone. ΣFIC=FIC_{A}+FIC_{B}=(C_{A}/MIC_{A})+(C_{B}/MIC_{B}). Synergy (FICI<0.5), additive (FICI>0.5-1.0), indifferent (FICI>1.0-2.0), and antagonistic (FICI>2.0), as highlighted on each bar chart. Related to Tables 18A, 18B, 19A and 19B.

[0061] FIG. 5E shows EKO-35 and the efflux platform can be used to assess efflux pump inhibitor specificities and efflux pump interplay. FIG. 5E shows bar charts depicting fractional inhibitory concentration index (FICI) values of 1-(1-naphthylmethyl)-piperazine (NMP) in combination with fusidic acid and ciprofloxacin. The FICI represents the ΣFIC of each drug. The FIC for each drug was determined by dividing the MIC of each drug in combination, by the MIC of each drug alone. ΣFIC=FIC_{A}+FIC_{B}=(C_{A}/MIC_{A})+(C_{B}/MIC_{B}). Synergy (FICI<0.5), additive (FICI>0.5-1.0), indifferent (FICI>1.0-2.0), and antagonistic (FICI>2.0), as highlighted on each bar chart. Related to Tables 18A, 18B, 19A and 19B.

[0062] FIG. 5F shows EKO-35 and the efflux platform can be used to assess efflux pump inhibitor specificities and efflux pump interplay. Bar charts depicting fractional inhibitory concentration index (FICI) values of 1-(1-naphthylmethyl)-piperazine (NMP) in combination with erythromycin and linezolid. The FICI represents the ΣFIC of each drug. The FIC for each drug was determined by dividing the MIC of each drug in combination, by the MIC of each drug alone. ΣFIC=FIC_{A}+FIC_{B}=(C_{A}/MIC_{A})+(C_{B}/MIC_{B}). Synergy (FICI<0.5), additive (FICI>0.5-1.0), indifferent (FICI>1.0-2.0), and antagonistic (FICI>2.0), as highlighted on each bar chart. Related to Tables 18A, 18B, 19A and 19B.

[0063] FIG. 5G shows EKO-35 and the efflux platform can be used to assess efflux pump inhibitor specificities and efflux pump interplay. The efflux pump platform identified instances of interplay between pumps with acriflavine (EKO-35). All integrated strains were transformed with the empty vector (pGDP-2). Genes encoding AcrB, AcrEF, AcrD, and MdtEF were integrated into the arabinose operon (araC) of EKO-35. Related to Table 20. Data represent mean MIC values for which the OD₆₀₀ₙₘ value >0.100, ±s.d. of three independent biological replicates. P-values were calculated by a two-tailed Student's t-test (*P<0.05, **P<0.01, ***P<0.001, ****P<0.0001).

[0064] FIG. 5H shows EKO-35 and the efflux platform can be used to assess efflux pump inhibitor specificities and efflux pump interplay. Interplay was maintained in porinated EKO-35 (EKO-35-Pore) with acriflavine, pGDP-2 harboring emrE is denoted as pEmrE. All integrated strains were transformed with the empty vector (pGDP-2). Genes encoding AcrB, AcrEF, AcrD, and MdtEF were integrated into the arabinose operon (araC) of EKO-35. Related to Table 20. Data represent mean MIC values for which the OD₆₀₀ₙₘ value >0.100, ±s.d. of three independent biological replicates. P-values were calculated by a two-tailed Student's t-test (*P<0.05, **P<0.01, ***P<0.001, ****p<0.0001).

[0065] FIG. 5I shows EKO-35 and the efflux platform can be used to assess efflux pump inhibitor specificities and efflux pump interplay. The efflux pump platform identified instances of interplay between pumps with ethidium bromide (EKO-35). All integrated strains were transformed with the empty vector (pGDP-2). Genes encoding AcrB, AcrEF, AcrD, and MdtEF were integrated into the arabinose operon (araC) of EKO-35. Related to Table 20. Data represent mean MIC values for which the OD₆₀₀ₙₘ value >0.100, ±s.d. of three independent biological replicates. P-values were calculated by a two-tailed Student's t-test (*P<0.05, **P<0.01, ***P<0.001, ****p<0.0001).

[0066] FIG. 5J shows EKO-35 and the efflux platform can be used to assess efflux pump inhibitor specificities and efflux pump interplay. Interplay was maintained in porinated EKO-35 (EKO-35-Pore) with ethidium bromide, pGDP-2 harboring emrE is denoted as pEmrE All integrated strains were transformed with the empty vector (pGDP-2). Genes encoding AcrB, AcrEF, AcrD, and MdtEF were integrated into the arabinose operon (araC) of EKO-35. Related to Table 20. Data represent mean MIC values for which the OD₆₀₀ₙₘ value >0.100, ±s.d. of three independent biological replicates. P-values were calculated by a two-tailed Student's t-test (*P<0.05, **P<0.01, ***P<0.001, ****P<0.0001).

[0067] FIG. 6 shows genotype of EKO-35 as determined by next-generation Illumine sequencing. Deleted and/or inactivated efflux-encoding genes are shown as black arrows. Secondary genomic mutations incurred in non-efflux encoding genes are shown as white arrows.

[0068] FIG. 7 shows susceptibility testing to confirm the AcrB_{D408A} mutant (EKO-35 araC::acrB_{D408A}) is inactive despite being produced in equivalent amounts to AcrB (FIG. 1A) when the genes were integrated into the arabinose operon (araC gene) of EKO-35, with gene expression under the control of the constitutive P_{LacI} promoter. Data points represent the mean of four technical replicates ±s.d.

[0069] FIG. 8A shows profiling EKO-35 with ASKA constructs expressing pitA in nutrient-rich Lysogeny broth (left) and M9 minimal glucose medium (right). Solid symbols represent empty vector controls while open symbols represent ASKA expressing constructs. Plasmids were induced with 0.1 mM IPTG and plasmid selection for EKO-35 was achieved using 1 μg/mL in M9 minimal glucose medium and 4 μg/mL in Lysogeny broth. Data represent mean values of three independent biological replicates.

[0070] FIG. 8B shows profiling EKO-35 with ASKA constructs expressing yjfC in nutrient-rich Lysogeny broth (left) and M9 minimal glucose medium (right). Solid symbols represent empty vector controls while open symbols represent ASKA expressing constructs. Plasmids were induced with 0.1 mM IPTG and plasmid selection for EKO-35 was achieved using 1 μg/mL in M9 minimal glucose medium and 4 μg/mL in Lysogeny broth. Data represent mean values of three independent biological replicates.

[0071] FIG. 8C shows profiling EKO-35 with ASKA constructs expressing tufA in nutrient-rich Lysogeny broth (left) and M9 minimal glucose medium (right). Solid symbols represent empty vector controls while open symbols represent ASKA expressing constructs. Plasmids were induced with 0.1 mM IPTG and plasmid selection for EKO-35 was achieved using 1 μg/mL in M9 minimal glucose medium and 4 μg/mL in Lysogeny broth. Data represent mean values of three independent biological replicates.

[0072] FIG. 8D shows profiling EKO-35 with ASKA constructs expressing rspA in nutrient-rich Lysogeny broth (left) and M9 minimal glucose medium (right). Solid symbols represent empty vector controls while open symbols represent ASKA expressing constructs. Plasmids were induced with 0.1 mM IPTG and plasmid selection for EKO-35 was achieved using 1 μg/mL in M9 minimal glucose medium and 4 μg/mL in Lysogeny broth. Data represent mean values of three independent biological replicates.

[0073] FIG. 8E shows profiling EKO-35 with ASKA constructs expressing wcaC in nutrient-rich Lysogeny broth (left) and M9 minimal glucose medium (right). Solid symbols represent empty vector controls while open symbols represent ASKA expressing constructs. Plasmids were induced with 0.1 mM IPTG and plasmid selection for EKO-35 was achieved using 1 μg/mL in M9 minimal glucose medium and 4 μg/mL in Lysogeny broth. Data represent mean values of three independent biological replicates.

[0074] FIG. 8F shows profiling EKO-35 with ASKA constructs expressing gyrB in nutrient-rich Lysogeny broth (left) and M9 minimal glucose medium (right). Solid symbols represent empty vector controls while open symbols represent ASKA expressing constructs. Plasmids were induced with 0.1 mM IPTG and plasmid selection for EKO-35 was achieved using 1 μg/mL in M9 minimal glucose medium and 4 μg/mL in Lysogeny broth. Data represent mean values of three independent biological replicates.

[0075] FIG. 9A shows the growth of EKO-35 at acidic and alkaline pH is not restored through plasmid-based complementation of genes in EKO-35 harboring nonsynonymous genomic mutations. EKO-35 growth is significantly reduced at pH 5.0.

[0076] FIG. 9B shows the growth of EKO-35 at acidic and alkaline pH is not restored through plasmid-based complementation of genes in EKO-35 harboring nonsynonymous genomic mutations. EKO-35 growth is significantly reduced at pH 5.5. ASKA plasmids were induced with 0.1 mM IPTG and plasmid selection for EKO-35 was achieved using 1 μg/mL chloramphenicol. Data represent mean values±s.d. of three independent biological end-point readings after 18 h of growth. P-values were calculated by a two-tailed Student's t-test (****P<0.0001) relative to EKO-35 pCA24N,

[0077] FIG. 9C shows the growth of EKO-35 at acidic and alkaline pH is not restored through plasmid-based complementation of genes in EKO-35 harboring nonsynonymous genomic mutations. EKO-35 growth is significantly reduced at pH 8.5. ASKA plasmids were induced with 0.1 mM IPTG and plasmid selection for EKO-35 was achieved using 1 μg/mL chloramphenicol. Data represent mean values±s.d. of three independent biological end-point readings after 18 h of growth. P-values were calculated by a two-tailed Student's t-test (****P<0.0001) relative to EKO-35 pCA24N,

[0078] FIG. 9D shows the growth of EKO-35 at acidic and alkaline pH is not restored through plasmid-based complementation of genes in EKO-35 harboring nonsynonymous genomic mutations. EKO-35 growth is significantly reduced at pH 9.0. ASKA plasmids were induced with 0.1 mM IPTG and plasmid selection for EKO-35 was achieved using 1 μg/mL chloramphenicol. Data represent mean values±s.d. of three independent biological end-point readings after 18 h of growth. P-values were calculated by a two-tailed Student's t-test (****P<0.0001) relative to EKO-35 pCA24N,

[0079] FIG. 10A shows plasmid-based complementation of genes in EKO-35 harboring genomic mutations alters biofilm formation in wild-type E. coli. Expression of rspA significantly increased biofilm formation in wild-type E. coli, whilst expression of pitA, tufA, gyrB, and yjfC significantly lowers biofilm formation. ASKA plasmids were induced using 0.1 mM IPTG and plasmid selection for EKO-35 was achieved using 1 μg/mL chloramphenicol in M9 minimal glucose medium and 4 μg/mL in Lysogeny broth. Data represent mean values±s.d. of three independent biological end-point readings after 24 h and 48 h of growth in nutrient-rich and -limited media, respectively. P-values were calculated by a two-tailed Student's t-test (****P<0.0001).

[0080] FIG. 10B shows plasmid-based complementation of genes in EKO-35 harboring genomic mutations alters biofilm formation in EKO-35. Expression of rspA significantly increased biofilm formation in EKO-35 in nutrient-rich Lysogeny broth, whilst expression of pitA, tufA, gyrB, and yjfC significantly lowers biofilm formation. ASKA plasmids were induced using 0.1 mM IPTG and plasmid selection for EKO-35 was achieved using 1 μg/mL chloramphenicol in M9 minimal glucose medium and 4 μg/mL in Lysogeny broth. Data represent mean values±s.d. of three independent biological end-point readings after 24 h and 48 h of growth in nutrient-rich and -limited media, respectively. P-values were calculated by a two-tailed Student's t-test (****P<0.0001).

[0081] FIG. 11A shows profiling of EKO-35 in low oxygen environments with ASKA constructs expressing pitA in nutrient-rich Lysogeny broth with 10 mM KNO₃ (1% oxygen) (left) and M9 minimal glucose medium (5% oxygen) (right). Solid symbols represent empty vector controls while open symbols represent ASKA expressing constructs. Plasmids were induced with 0.1 mM IPTG and plasmid maintenance for EKO-35 was achieved using 1 μg/mL chloramphenicol in M9 minimal glucose medium and 4 μg/mL chloramphenicol in lysogeny broth. Data represent mean values of three independent biological replicates.

[0082] FIG. 11B shows profiling of EKO-35 in low oxygen environments with ASKA constructs expressing yjfC in nutrient-rich Lysogeny broth with 10 mM KNO₃ (1% oxygen) (left) and M9 minimal glucose medium (5% oxygen) (right). Solid symbols represent empty vector controls while open symbols represent ASKA expressing constructs. Plasmids were induced with 0.1 mM IPTG and plasmid maintenance for EKO-35 was achieved using 1 μg/mL chloramphenicol in M9 minimal glucose medium and 4 μg/mL chloramphenicol in lysogeny broth. Data represent mean values of three independent biological replicates.

[0083] FIG. 11C shows profiling of EKO-35 in low oxygen environments with ASKA constructs expressing tufA in nutrient-rich Lysogeny broth with 10 mM KNO₃ (1% oxygen) (left) and M9 minimal glucose medium (5% oxygen) (right). Solid symbols represent empty vector controls while open symbols represent ASKA expressing constructs. Plasmids were induced with 0.1 mM IPTG and plasmid maintenance for EKO-35 was achieved using 1 μg/mL chloramphenicol in M9 minimal glucose medium and 4 μg/mL chloramphenicol in lysogeny broth. Data represent mean values of three independent biological replicates.

[0084] FIG. 11D shows profiling of EKO-35 in low oxygen environments with ASKA constructs expressing rspA in nutrient-rich Lysogeny broth with 10 mM KNO₃ (1% oxygen) (left) and M9 minimal glucose medium (5% oxygen) (right). Solid symbols represent empty vector controls while open symbols represent ASKA expressing constructs. Plasmids were induced with 0.1 mM IPTG and plasmid maintenance for EKO-35 was achieved using 1 μg/mL chloramphenicol in M9 minimal glucose medium and 4 μg/mL chloramphenicol in lysogeny broth. Data represent mean values of three independent biological replicates.

[0085] FIG. 11E shows profiling of EKO-35 in low oxygen environments with ASKA constructs expressing wcaC in nutrient-rich Lysogeny broth with 10 mM KNO₃ (1% oxygen) (left) and M9 minimal glucose medium (5% oxygen) (right). Solid symbols represent empty vector controls while open symbols represent ASKA expressing constructs. Plasmids were induced with 0.1 mM IPTG and plasmid maintenance for EKO-35 was achieved using 1 μg/mL chloramphenicol in M9 minimal glucose medium and 4 μg/mL chloramphenicol in lysogeny broth. Data represent mean values of three independent biological replicates.

[0086] FIG. 11F shows profiling of EKO-35 in low oxygen environments with ASKA constructs expressing gyrB in nutrient-rich Lysogeny broth with 10 mM KNO₃ (1% oxygen) (left) and M9 minimal glucose medium (5% oxygen) (right). Solid symbols represent empty vector controls while open symbols represent ASKA expressing constructs. Plasmids were induced with 0.1 mM IPTG and plasmid maintenance for EKO-35 was achieved using 1 μg/mL chloramphenicol in M9 minimal glucose medium and 4 μg/mL chloramphenicol in lysogeny broth. Data represent mean values of three independent biological replicates.

[0087] FIG. 12 shows structures of synthetic compounds determined to be substrates for efflux. Compounds were visualized using Chem Prime 20.1 (Version 20.1.0.112). EKO-35 was susceptible to compounds 4, 5, 11, 13, 16, and 18.

[0088] FIG. 13A shows results from assessing the susceptibility of EKO-35 harboring ASKA plasmids expressing rspA, tufA, pitA, wcaC, gyrB, and yjfC. Strains were profiled against benzalkonium chloride. MICs were determined i, without (left) and with chloramphenicol (right) to maintain ASKA plasmids. All plasmids were induced with 0.1 mM IPTG. 25 μg/mL and 4 μg/mL chloramphenicol was used to maintain ASKA plasmids in wild-type E. coli and EKO-35, respectively. Strains were assessed in technical duplicate.

[0089] FIG. 13B shows results from assessing the susceptibility of EKO-35 harboring ASKA plasmids expressing rspA, tufA, pitA, wcaC, gyrB, and yjfC. Strains were profiled against novobiocin. MICs were determined without (left) and with chloramphenicol (right) to maintain ASKA plasmids. All plasmids were induced with mM IPTG. 25 μg/mL and 4 μg/mL chloramphenicol was used to maintain ASKA plasmids in wild-type E. coli and EKO-35, respectively. Strains were assessed in technical duplicate.

[0090] FIG. 13C shows results from assessing the susceptibility of EKO-35 harboring ASKA plasmids expressing rspA, tufA, pitA, wcaC, gyrB, and yjfC. Strains were profiled against trimethoprim. MICs were determined without (left) and with chloramphenicol to maintain ASKA plasmids. All plasmids were induced with 0.1 mM IPTG. 25 μg/mL and 4 μg/mL chloramphenicol was used to maintain ASKA plasmids in wild-type E. coli and EKO-35, respectively. Strains were assessed in technical duplicate.

[0091] FIG. 13D shows results from assessing the susceptibility of EKO-35 harboring ASKA plasmids expressing rspA, tufA, pitA, wcaC, gyrB, and yjfC. Strains were profiled against synthetic 2. MICs were determined without (left) and with chloramphenicol (right) to maintain ASKA plasmids. All plasmids were induced with mM IPTG. 25 μg/mL and 4 μg/mL chloramphenicol was used to maintain ASKA plasmids in wild-type E. coli and EKO-35, respectively. Strains were assessed in technical duplicate.

[0092] FIG. 13E shows results from assessing the susceptibility of EKO-35 harboring ASKA plasmids expressing rspA, tufA, pitA, wcaC, gyrB, and yjfC. Strains were profiled against synthetic 14. MICs were determined without (left) and with chloramphenicol (right) to maintain ASKA plasmids. All plasmids were induced with mM IPTG. 25 μg/mL and 4 μg/mL chloramphenicol was used to maintain ASKA plasmids in wild-type E. coli and EKO-35, respectively. Strains were assessed in technical duplicate.

[0093] FIG. 13F shows results from assessing the susceptibility of EKO-35 harboring ASKA plasmids expressing rspA, tufA, pitA, wcaC, gyrB, and yjfC. Strains were profiled against synthetic 19. MICs were determined without (left) and with chloramphenicol (right) to maintain ASKA plasmids. All plasmids were induced with mM IPTG. 25 μg/mL and 4 μg/mL chloramphenicol was used to maintain ASKA plasmids in wild-type E. coli and EKO-35, respectively. Strains were assessed in technical duplicate.

[0094] FIG. 14A shows heat maps depicting susceptibility levels of strains expressing efflux pump-encoding genes. Each strain was tested in technical duplicate and MIC values were normalized to 100% for each compound tested, where dark gray represents the highest MIC value, and white represents the lowest value (see key). Genes encoding AcrEF, were chromosomally integrated into the wild-type strain, a single gene deletion mutant, and EKO-35. Susceptibility testing revealed no changes in the resistance levels of the wild-type or single gene deletion backgrounds, except for ΔacrB (FIG. 14C). EKO-35 was highly susceptible to all compounds tested, revealing susceptibility profiles similar to ΔtolC, and integration of efflux genes into this strain conferred resistance to the known substrates.

[0095] FIG. 14B shows heat maps depicting susceptibility levels of strains expressing efflux pump-encoding genes. Each strain was tested in technical duplicate and MIC values were normalized to 100% for each compound tested, where dark gray represents the highest MIC value, and white represents the lowest value (see key). Genes encoding AcrD were chromosomally integrated into the wild-type strain, a single gene deletion mutant, and EKO-35. Susceptibility testing revealed no changes in the resistance levels of the wild-type or single gene deletion backgrounds, except for ΔacrB (FIG. 14C). EKO-35 was highly susceptible to all compounds tested, revealing susceptibility profiles similar to ΔtolC, and integration of efflux genes into this strain conferred resistance to the known substrates.

[0096] FIG. 14C shows heat maps depicting susceptibility levels of strains expressing efflux pump-encoding genes. Each strain was tested in technical duplicate and MIC values were normalized to 100% for each compound tested, where dark gray represents the highest MIC value, and white represents the lowest value (see key). Genes encoding AcrB were chromosomally integrated into the wild-type strain, a single gene deletion mutant, and EKO-35. EKO-35 was highly susceptible to all compounds tested, revealing susceptibility profiles similar to ΔtolC, and integration of efflux genes into this strain conferred resistance to the known substrates.

[0097] FIG. 14D shows heat maps depicting susceptibility levels of strains expressing efflux pump-encoding genes. Each strain was tested in technical duplicate and MIC values were normalized to 100% for each compound tested, where dark gray represents the highest MIC value, and white represents the lowest value (see key). Genes encoding MdtEF were chromosomally integrated into the wild-type strain, a single gene deletion mutant, and EKO-35. Susceptibility testing revealed no changes in the resistance levels of the wild-type or single gene deletion backgrounds, except for ΔacrB (FIG. 14C). EKO-35 was highly susceptible to all compounds tested, revealing susceptibility profiles similar to ΔtolC, and integration of efflux genes into this strain conferred resistance to the known substrates.

[0098] FIG. 14E shows heat maps depicting susceptibility levels of strains expressing efflux pump-encoding genes. Each strain was tested in technical duplicate and MIC values were normalized to 100% for each compound tested, where dark gray represents the highest MIC value, and white represents the lowest value (see key). Genes encoding MdtBC were chromosomally integrated into the wild-type strain, a single gene deletion mutant, and EKO-35. Susceptibility testing revealed no changes in the resistance levels of the wild-type or single gene deletion backgrounds, except for ΔacrB (FIG. 14C). EKO-35 was highly susceptible to all compounds tested, revealing susceptibility profiles similar to ΔtolC, and integration of efflux genes into this strain conferred resistance to the known substrates.

[0099] FIG. 14F shows heat maps depicting susceptibility levels of strains expressing efflux pump-encoding genes. Each strain was tested in technical duplicate and MIC values were normalized to 100% for each compound tested, where dark gray represents the highest MIC value, and white represents the lowest value (see key). Genes encoding MacAB were chromosomally integrated into the wild-type strain, a single gene deletion mutant, and EKO-35. Susceptibility testing revealed no changes in the resistance levels of the wild-type or single gene deletion backgrounds, except for ΔacrB (FIG. 14C). EKO-35 was highly susceptible to all compounds tested, revealing susceptibility profiles similar to ΔtolC, and integration of efflux genes into this strain conferred resistance to the known substrates.

[0100] FIG. 14G shows heat maps depicting susceptibility levels of strains expressing efflux pump-encoding genes. Each strain was tested in technical duplicate and MIC values were normalized to 100% for each compound tested, where dark gray represents the highest MIC value, and white represents the lowest value (see key). Genes encoding MacAB were chromosomally integrated into the wild-type strain, a single gene deletion mutant, and EKO-35. Susceptibility testing revealed no changes in the resistance levels of the wild-type or single gene deletion backgrounds, except for ΔacrB (FIG. 14C). EKO-35 was highly susceptible to all compounds tested, revealing susceptibility profiles similar to ΔtolC, and integration of efflux genes into this strain conferred resistance to the known substrates.

[0101] FIG. 14H shows heat maps depicting susceptibility levels of strains expressing efflux pump-encoding genes. Each strain was tested in technical duplicate and MIC values were normalized to 100% for each compound tested, where dark gray represents the highest MIC value, and white represents the lowest value (see key). Genes encoding MexCD were chromosomally integrated into the wild-type strain, a single gene deletion mutant, and EKO-35. Susceptibility testing revealed no changes in the resistance levels of the wild-type or single gene deletion backgrounds, except for ΔacrB (FIG. 14C). EKO-35 was highly susceptible to all compounds tested, revealing susceptibility profiles similar to ΔtolC, and integration of efflux genes into this strain conferred resistance to the known substrates.

[0102] FIG. 15A shows susceptibility and growth profiling of porinated wild-type (WT) K-12, ΔtolC, and EKO-35 strains. FIG. 15A shows heatmap depicting vancomycin susceptibility of the porinated strains. Each strain was tested in technical duplicate and MIC values were normalized to 100%, where dark gray represents the highest MIC value, and white represents the lowest value (see key). Susceptibility of the WT K-12, ΔtolC, and EKO-35 strains+/−the pore was assessed for 52 compounds.

[0103] FIG. 15B shows susceptibility and growth profiling of porinated wild-type (WT) K-12, ΔtolC, and EKO-35 strains. FIG. 15B shows growth profiling of WT K-12-Pore and EKO-35-Pore in LB at 37° C. Measurement of growth kinetics revealed the pore did not significantly impact the length of the lag phase (P>0.05) or generation time (P>0.05) compared to the parental strains, which was assessed using three biological replicates. Susceptibility of the WT K-12, ΔtolC, and EKO-35 strains+/−the pore was assessed for 52 compounds.

[0104] FIG. 15C shows molecular weight for each compound that resulted in a 4-fold or greater increase in susceptibility compared to the wild-type strain presented as individual data points in the box plots, the line through the center of each box indicates the median, and whiskers the minimum and maximum values. Molecular weights (MW) were calculated using DataWarrior (Version 5.5.0).

[0105] FIG. 15D shows lipophilicity for each compound that resulted in a 4-fold or greater increase in susceptibility compared to the wild-type strain presented as individual data points in the box plots, the line through the center of each box indicates the median, and whiskers the minimum and maximum values. Lipophilicities (log P) were calculated using DataWarrior (Version 5.5.0).

[0106] FIG. 15E shows aqueous solubility for each compound that resulted in a 4-fold or greater increase in susceptibility compared to the wild-type strain presented as individual data points in the box plots, the line through the center of each box indicates the median, and whiskers the minimum and maximum values. Aqueous solubilities (log S) were calculated using DataWarrior (Version 5.5.0).

[0107] FIG. 15F shows polar surface area for each compound that resulted in a 4-fold or greater increase in susceptibility compared to the wild-type strain presented as individual data points in the box plots, the line through the center of each box indicates the median, and whiskers the minimum and maximum values. Polar Surface Areas (PSA) were calculated using DataWarrior (Version 5.5.0).

[0108] FIG. 15G shows physicochemical properties calculated using DataWarrior (Version 5.5.0). FIG. 15G shows summary of the physicochemical properties ranges for each strain. Medians are indicated in parentheses.

[0109] FIG. 16A shows heat maps depicting aminoglycoside susceptibility of the wild-type K-12 strain and an ΔacrD mutant expressing the chromosomally integrated acrD gene (araC::acrD) using kanamycin in cation-adjusted Mueller Hinton II Broth (MHB II). The cell inoculum used was 10⁴ cells/mL to replicate susceptibility testing conditions used in previous studies. Each strain was assessed using three technical replicates and MIC values were normalized to 100% for each compound tested, where dark gray represents the highest MIC value, and white represents the lowest value (see key).

[0110] FIG. 16B shows heat maps depicting aminoglycoside susceptibility of the wild-type K-12 strain and an ΔacrD mutant expressing the chromosomally integrated acrD gene (araC::acrD) using kanamycin in Lysogeny broth (LB). The cell inoculum used was 10⁴ cells/mL to replicate susceptibility testing conditions used in previous studies. Each strain was assessed using three technical replicates and MIC values were normalized to 100% for each compound tested, where dark gray represents the highest MIC value, and white represents the lowest value (see key).

[0111] FIG. 16C shows heat maps depicting aminoglycoside susceptibility of the wild-type K-12 strain and an ΔacrD mutant expressing the chromosomally integrated acrD gene (araC::acrD) using gentamicin in MHB II. The cell inoculum used was 10⁴ cells/mL to replicate susceptibility testing conditions used in previous studies. Each strain was assessed using three technical replicates and MIC values were normalized to 100% for each compound tested, where dark gray represents the highest MIC value, and white represents the lowest value (see key).

[0112] FIG. 16D shows heat maps depicting aminoglycoside susceptibility of the wild-type K-12 strain and an ΔacrD mutant expressing the chromosomally integrated acrD gene (araC::acrD) using gentamicin in LB. The cell inoculum used was 10⁴ cells/mL to replicate susceptibility testing conditions used in previous studies. Each strain was assessed using three technical replicates and MIC values were normalized to 100% for each compound tested, where dark gray represents the highest MIC value, and white represents the lowest value (see key).

[0113] FIG. 17A shows EKO-35 and the efflux platform can be used to assess efflux pump interplay. Interplay was not observed for novobiocin in EKO-35. pGDP-2 harboring emrE is denoted as pEmrE. All integrated strains were transformed with the empty vector (pGDP-2). Genes encoding AcrB, AcrEF, AcrD, and MdtEF were integrated into the arabinose operon (araC) of EKO-35. Related to Table 20. Data represent mean MIC values for which the OD₆₀₀ₙₘ value >0.100, ±s.d. of three independent biological replicates. P-values were calculated by a two-tailed Student's t-test (*P<0.05, **P<0.01, ***P<0.001, ****P<0.0001).

[0114] FIG. 17B shows EKO-35 and the efflux platform can be used to assess efflux pump interplay. Interplay was not observed for novobiocin in EKO-35-Pore pGDP-2 harboring emrE is denoted as pEmrE. All integrated strains were transformed with the empty vector (pGDP-2). Genes encoding AcrB, AcrEF, AcrD, and MdtEF were integrated into the arabinose operon (araC) of EKO-35. Related to Table 20. Data represent mean MIC values for which the OD₆₀₀ₙₘ value >0.100, ±s.d. of three independent biological replicates. P-values were calculated by a two-tailed Student's t-test (*P<0.05, **P<0.01, ***P<0.001, ****P<0.0001).

[0115] FIG. 17C shows EKO-35 and the efflux platform can be used to assess efflux pump interplay. Interplay was not observed for novobiocin in EKO-35. pGDP-2 harboring emrE is denoted as pEmrE. All integrated strains were transformed with the empty vector (pGDP-2). Genes encoding AcrB, AcrEF, AcrD, and MdtEF were integrated into the arabinose operon (araC) of EKO-35. Related to Table 20. Data represent mean MIC values for which the OD₆₀₀ₙₘ value >0.100, ±s.d. of three independent biological replicates. P-values were calculated by a two-tailed Student's t-test (*P<0.05, **P<0.01, ***P<0.001, ****P<0.0001).

[0116] FIG. 17D shows EKO-35 and the efflux platform can be used to assess efflux pump interplay. Interplay was not observed for novobiocin in EKO-35-Pore. pGDP-2 harboring emrE is denoted as pEmrE. All integrated strains were transformed with the empty vector (pGDP-2). Genes encoding AcrB, AcrEF, AcrD, and MdtEF were integrated into the arabinose operon (araC) of EKO-35. Related to Table 20. Data represent mean MIC values for which the OD₆₀₀ₙₘ value >0.100, ±s.d. of three independent biological replicates. P-values were calculated by a two-tailed Student's t-test (*P<0.05, **P<0.01, ***P<0.001, ****P<0.0001).

[0117] FIG. 18 shows a graphical depiction of K-12, EKO-35, EKO-35 Pore, EKO-35 araC::X, and EKO-35 araC::X Y:pGDP of the present disclosure.

[0118] FIG. 19 show phenotypic analysis of EKO-35v2 in nutrient-rich conditions. Measurement of growth kinetics of EKO-35v1 (Example 1) and EKO-35v2 was assessed using n=3 biological replicates (Table 25).

### DETAILED DESCRIPTION

[0119] Unless otherwise indicated, the definitions and embodiments described in this and other sections are intended to be applicable to all embodiments and aspects of the present disclosure herein described for which they are suitable as would be understood by a person skilled in the art.

[0120] In understanding the scope of the present disclosure, the term “comprising” and its derivatives, as used herein, are intended to be open ended terms that specify the presence of the stated features, elements, components, groups, integers, and/or steps, but do not exclude the presence of other unstated features, elements, components, groups, integers and/or steps. The foregoing also applies to words having similar meanings such as the terms, “including”, “having” and their derivatives. The term “consisting” and its derivatives, as used herein, are intended to be closed terms that specify the presence of the stated features, elements, components, groups, integers, and/or steps, but exclude the presence of other unstated features, elements, components, groups, integers and/or steps. The term “consisting essentially of”, as used herein, is intended to specify the presence of the stated features, elements, components, groups, integers, and/or steps as well as those that do not materially affect the basic and novel characteristic(s) of features, elements, components, groups, integers, and/or steps.

[0121] As used herein, the singular forms “a”, “an” and “the” include plural references unless the content clearly dictates otherwise.

[0122] The term “nucleic acid”, “nucleic acid molecule” or its derivatives, as used herein, is intended to include unmodified DNA or RNA or modified DNA or RNA. For example, the nucleic acid molecules of the disclosure can be composed of single- and double-stranded DNA, DNA that is a mixture of single- and double-stranded regions, single- and double-stranded RNA, and RNA that is a mixture of single- and double-stranded regions, hybrid molecules comprising DNA and RNA that may be single-stranded or, more typically double-stranded or a mixture of single- and double-stranded regions. In addition, the nucleic acid molecules can be composed of triple-stranded regions comprising RNA or DNA or both RNA and DNA. The nucleic acid molecules of the disclosure may also contain one or more modified bases or DNA or RNA backbones modified for stability or for other reasons. “Modified” bases include, for example, tritiated bases and unusual bases such as inosine. A variety of modifications can be made to DNA and RNA; thus “nucleic acid molecule” embraces chemically, enzymatically, or metabolically modified forms. The term “polynucleotide” shall have a corresponding meaning.

[0123] As used herein, the term “inactivation of a gene”, or a derivative thereof, refers to reduction or elimination in the activity of the protein encoded by a gene due to the reduction or elimination of the gene expression via mutation induced by one or more methods selected from the group consisting of deletion of all or a part of the corresponding gene, substitution of a part of the nucleotide sequence, or deletion or insertion of one or more base pairs into the nucleotide sequence.

[0124] As used herein, the term “reactivation”, or a derivative thereof, when relating to a gene, refers to increase or reintroduction in the activity of the protein encoded by a gene due to the increase or reintroduction of the gene expression via mutation induced by one or more methods selected from the group consisting of insertion of all or a part of the corresponding gene, substitution of a part of the nucleotide sequence, or deletion or insertion of one or more base pairs into the nucleotide sequence. Reactivation or reactivated includes restoring the gene as prior to inactivation, with previous promoter or with a different promoter, whether it a constitutive or conditional promoter. Reactivation can include tunable expression to control the level of the restored gene, including overexpression, returning to previous level or under-expressing as compared to previous levels. The reactivation, including reintroduction, can be at the same locus or at a different locus of the bacterial strain's genome. The reactivation, including reintroduction, of gene can include introduction of mutation that affect the function of the gene, for example, efflux pump function, including interaction with compounds or other genes. In some embodiments, reactivation of a gene comprises reintroduction of a gene. In some embodiments, reactivation of a gene occurs at the same locus, or at a different locus in a bacterial strain's genome. In some embodiments, reintroduction of a gene occurs at the same locus, or at a different locus in a bacterial strain's genome.

[0125] As used herein, the term “polypeptide” encompasses both peptides and proteins, and fragments thereof of peptides and proteins, unless indicated otherwise. In one embodiment, the therapeutic agent is a polypeptide.

[0126] The term “promoter,” as used herein, refers to a nucleotide sequence that directs the transcription of a gene or coding sequence to which it is operably linked.

[0127] The term “operably linked”, as used herein, refers to an arrangement of two or more components, wherein the components so described are in a relationship permitting them to function in a coordinated manner. For example, a transcriptional regulatory sequence or a promoter is operably linked to a coding sequence if the transcriptional regulatory sequence or promoter facilitates aspects of the transcription of the coding sequence. The skilled person can readily recognize aspects of the transcription process, which include, but not limited to, initiation, elongation, attenuation and termination. In general, an operably linked transcriptional regulatory sequence is joined in cis with the coding sequence, but it is not necessarily directly adjacent to it.

[0128] A “segment” of a nucleotide sequence is a sequence of contiguous nucleotides. A segment can be at least about 5, 10, 15, 20, 25, 30, 35, 40, 45, 50, 60, 85, 100, 110, 120, 130, 145, 150, 160, 175, 200, 250, 300, 350, 400, 450, 500 or more contiguous nucleotides.

[0129] A “fragment” of an amino acid sequence is a sequence of contiguous amino acids. A segment can be at least about 5, 10, 15, 20, 25, 30, 35, 40, 45, 50, 60, 85, 100, 110, 120, 130, 145, 150, 160, 175, 200, 250, 300, 350, 400, 450, 500 or more contiguous amino acids.

[0130] The term “antibacterial agent” as used herein refers to a microbial inhibiting agent, including anything that reduces virulence or modifies efflux pump activity, with or without the action of other compounds and adjuvants. For example, an antibacterial agent can be an efflux pump inhibitor.

[0131] The term “viability” as used herein refers to measurement known to the skilled person in assessing health of bacteria. Methods known in the art can be used to determine viability. Viability can be determined as a percentage over a control or as a minimal inhibitory concentration (MIC) when it is being affected by a compound, for example, an antibacterial agent such as an efflux pump inhibitor. Viability can also be determined relatively, for example, by comparing the rate of killing or inhibition of growth of the bacterial strain or wild-type bacteria described herein.

### Composition and Method of the Disclosure

[0132] The present disclosure provides an Escherichia coli strain that is deficient in efflux pump activity. Accordingly, provided herein is an Escherichia coli strain comprising at least 20, 21, 22, 23, 24, 25, 26, 27, 28, 29, 30, 31, 32, 33, 34, or of inactivated genes acrB, acrD, acrF, mdtF, macB, emrB, mdtL, mdtK, bcr, ydeA, mdtM, yddA, yebQ, emrE, mdtD, sugE, ynfM, emrD, ydeF, mdtJ, ydiM, mdtB, mdlA, emrY, mdfA, fsr, mdtG, mdtH, yieO, mdlB, mdtO, yojI, yajR, ydhC, and cusA. In some embodiments, the strain comprises at least 20 of the inactivated genes. In some embodiments, the strain comprises at least 21 of the inactivated genes. In some embodiments, the strain comprises at least 22 of the inactivated genes. In some embodiments, the strain comprises at least 23 of the inactivated genes. In some embodiments, the strain comprises at least 24 of the inactivated genes. In some embodiments, the strain comprises at least 25 of the inactivated genes. In some embodiments, the strain comprises at least 26 of the inactivated genes. In some embodiments, the strain comprises at least 27 of the inactivated genes. In some embodiments, the strain comprises at least 28 of the inactivated genes. In some embodiments, the strain comprises at least 29 of the inactivated genes. In some embodiments, the strain comprises at least 30 of the inactivated genes. In some embodiments, the strain comprises at least 31 of the inactivated genes. In some embodiments, the strain comprises at least 32 of the inactivated genes. In some embodiments, the strain comprises at least 33 of the inactivated genes. In some embodiments, the strain comprises at least 34 of the inactivated genes. In some embodiments, strain comprises all 35 inactivated genes. EKO-35v1 and EKO-35v2 are examples of EKO-35. In some embodiments, the Escherichia coli strain is EKO-35v1. In some embodiments, the Escherichia coli strain is EKO-35v2. In some embodiments, the Escherichia coli strain is deposited under IDAC accession number 310522-01 or IDAC accession number 070623-01. In some embodiments, the Escherichia coli strain is deposited under IDAC accession number 310522-01. In some embodiments, the Escherichia coli strain is deposited under IDAC accession number 070623-01. In some embodiments, the strain further comprises an open variant of outer membrane ferric siderophore transporter FhuA. In some embodiments, the strain further comprises deletion of tolC gene. In some embodiments, the strain comprises at least one of reactivated acrB, acrD, acrF, mdtF, macB, emrB, mdtL, mdtK, bcr, ydeA, mdtM, yddA, yebQ, emrE, mdtD, sugE, ynfM, emrD, ydeF, mdtJ, ydiM, mdtB, mdlA, emrY, mdfA, fsr, mdtG, mdtH, yieO, mdlB, mdtO, yojI, yajR, ydhC, and cusA, optionally under the control of a constitutive promoter. In some embodiments, one of reactivated acrB, acrD, acrF, mdtF, macB, emrB, mdtL, mdtK, bcr, ydeA, mdtM, yddA, yebQ, emrE, mdtD, sugE, ynfM, emrD, ydeF, mdtJ, ydiM, mdtB, mdlA, emrY, mdfA, fsr, mdtG, mdtH, yieO, mdlB, mdtO, yojI, yajR, ydhC, and cusA. In some embodiments, the inactivation comprises deletion of the gene, or introducing a mutation into the gene to ablate expression of the gene or eliminate efflux pump activity of the protein expressed by the gene. In some embodiments, acrB, acrD, acrF, mdtF, macB, emrB, mdtL, mdtK, bcr, ydeA, mdtM, yddA, yebQ, emrE, mdtD, sugE, ynfM, emrD, ydeF, mdtJ, ydiM, mdtB, mdlA, emrY, mdfA, fsr, mdtG, mdtH, yieO, mdlB, mdtO, yojI, yajR, ydhC, and cusA are genes encoding for efflux pumps. In some embodiments, the strain comprising at least 20 of inactivated genes acrB, acrD, acrF, mdtF, macB, emrB, mdtL, mdtK, bcr, ydeA, mdtM, yddA, yebQ, emrE, mdtD, sugE, ynfM, emrD, ydeF, mdtJ, ydiM, mdtB, mdlA, emrY, mdfA, fsr, mdtG, mdtH, yieO, mdlB, mdtO, yojI, yajR, ydhC, and cusA is an efflux pump deficient strain. In some embodiments, the strain comprises all 35 inactivated genes is EKO-35. In some embodiments, the strain comprises a nucleic acid comprising at least 50%, 55%, 60%, 65%, 70%, 75%, 80%, 85%, 90%, 91%, 92%, 93%, 94%, 95%, 96%, 97%, 98%, 99%, 99.1%, 99.2%, 99.3%, 99.4%, 99.5%, 99.6%, 99.7%, 99.8%, 99.9%, 99.91%, 99.92%, 99.93%, 99.94%, 99.95%, 99.96%, 99.97%, 99.98%, 99.99%, 99.999%, or 99.9999% sequence identity as any nucleotide sequence described herein. In some embodiments, the strain comprises a nucleic acid comprising 100% sequence identity as any nucleotide sequence described herein. In some embodiments, the strain comprises a nucleic acid comprising at least 50%, 55%, 60%, 65%, 70%, 75%, 80%, 85%, 90%, 91%, 92%, 93%, 94%, 95%, 96%, 97%, 98%, 99%, 99.1%, 99.2%, 99.3%, 99.4%, 99.5%, 99.6%, 99.7%, 99.8%, 99.9%, 99.91%, 99.92%, 99.93%, 99.94%, 99.95%, 99.96%, 99.97%, 99.98%, 99.99%, 99.999%, or 99.9999% sequence identity as the nucleotide sequence as shown in SEQ ID NO: 255. In some embodiments, the strain comprises a nucleic acid comprising at least 50%, 55%, 60%, 65%, 70%, 75%, 80%, 85%, 90%, 91%, 92%, 93%, 94%, 95%, 96%, 97%, 98%, 99%, 99.1%, 99.2%, 99.3%, 99.4%, 99.5%, 99.6%, 99.7%, 99.8%, 99.9%, 99.91%, 99.92%, 99.93%, 99.94%, 99.95%, 99.96%, 99.97%, 99.98%, 99.99%, 99.999%, or 99.9999% sequence identity as the nucleotide sequence as shown in SEQ ID NO: 255, and having least 20, 21, 22, 23, 24, 25, 26, 27, 28, 29, 30, 31, 32, 33, 34, or 35 of inactivated genes acrB, acrD, acrF, mdtF, macB, emrB, mdtL, mdtK, bcr, ydeA, mdtM, yddA, yebQ, emrE, mdtD, sugE, ynfM, emrD, ydeF, mdtJ, ydiM, mdtB, mdlA, emrY, mdfA, fsr, mdtG, mdtH, yieO, mdlB, mdtO, yojI, yajR, ydhC, and cusA. In some embodiments, the strain comprises a nucleic acid comprising 100% sequence identity as the nucleotide sequence as shown in SEQ ID NO: 255.

[0133] The molecular tools for inactivating and reactivating genes are known in the art. In some embodiments, the reactivation of gene comprises reintroducing gene under control of a constitutive promoter.

[0134] Also provided is a method for identifying a compound that is an antibacterial agent, comprising
[0135] (a) i) contacting the compound with the Escherichia coli strain described herein and with wild-type Escherichia coli; and/or
[0136] ii) contacting the compound with the Escherichia coli strain described herein having reactivated genes and EKO-35; and/or
[0137] iii) contacting the compound with the Escherichia coli strain described herein having reactivated genes and an efflux pump deficiency strain described herein; and
[0138] (b) detecting viability of each of the Escherichia coli;
[0139] wherein the compound is identified as an antibacterial agent if the compound decreases viability of wild-type less than the Escherichia coli strain with efflux pump deficiency described herein;
[0140] optionally wherein the compound is identified as an antibacterial agent if the compound decreases viability of the Escherichia coli strain having reactivated efflux pump genes less than the Escherichia coli strain having at least 20 inactivated efflux pump genes;
[0141] optionally wherein the compound is identified as an antibacterial agent if the wild-type Escherichia coli or the Escherichia coli strain having reactivated efflux pump genes is resistant to the compound, and the compound decreases the viability of the Escherichia coli strain having at least 20 inactivated efflux pump genes, or EKO-35.

[0142] In some embodiments, the antibacterial agent is a microbial inhibiting agent that reduces virulence or modifies efflux pump activity, with or without the action of other compounds and adjuvants. In some embodiments, the antibacterial agent is an efflux pump inhibitor.

[0143] In some embodiments, the decrease in viability of wild-type or the Escherichia coli strain described herein after contacting the compound is at most 10%, 20%, 30%, 40%, 50%, 60%, 70%, or 80%, or at least 20%, 30%, 40%, 50%, 60%, 70%, 80%, 90%, or 100%.

[0144] In some embodiments, the compound is identified as an antibacterial agent if the compound decreases the viability of efflux pump deficient Escherichia coli strain described herein at a faster rate than the decrease in viability of wild-type or the Escherichia coli strain comprising reactivated efflux pump genes.

[0145] In some embodiments, the compound decreases the viability of the Escherichia coli strain with one reactivated gene in an efflux deficient strain disclosed herein, optionally Escherichia coli strain EKO-35, is less than the efflux deficient strain disclosed herein, optionally Escherichia coli strain EKO-35, identifying specificity of the compound for an efflux pump encoded by the reactivated gene, optionally the compound has a lower minimum inhibitory concentration (MIC) in the Escherichia coli strain of EKO-35 than EKO-35 with a reactivated efflux pump.

[0146] The skilled person recognizes optimal conditions to carry out methods for identifying antibacterial agent or growth condition for the E. coli strain described herein. For example, optimal aeration can include broth cultures grown with aeration at 220 rpm. For example, for growth profiling, microtiter plates can be incubated at 37° C. or 25° C. with continuous linear shaking at 600 rpm. Other optimal conditions, as well as nutrient-limited conditions, are described in the Example.

[0147] In some embodiments, the contacting comprises the Escherichia coli in a suitable culturing media for optimal Escherichia coli growth. In some embodiments, the contacting comprises incubating the Escherichia coli in nutrient-limiting culturing media. In some embodiments, the contacting comprises incubating the Escherichia coli for at least 24 h, 48 h, 72 h, or 96 h. In some embodiments, the culturing media is a media having a pH of about 2, about 3, about 4, or about 5.

[0148] Also provided is a method for identifying a compound that is an antibacterial agent, comprising
[0149] (a) i) contacting the compound with an Escherichia coli strain of comprising at least 20 of inactivated genes acrB, acrD, acrF, mdtF, macB, emrB, mdtL, mdtK, bcr, ydeA, mdtM, yddA, yebQ, emrE, mdtD, sugE, ynfM, emrD, ydeF, mdtJ, ydiM, mdtB, mdlA, emrY, mdfA, fsr, mdtG, mdtH, yieO, mdlB, mdtO, yojI, yajR, ydhC, and cusA (Strain A), or the Escherichia coli strain deposited under IDAC accession number 310522-01 or IDAC accession number 070623-01, or an Escherichia coli comprising a nucleic acid having the sequence as shown in SEQ ID NO: 255, and with wild-type Escherichia coli; and/or
[0150] ii) contacting the compound with Strain A or the Escherichia coli strain deposited under IDAC accession number 310522-01 or IDAC accession number 070623-01, or an Escherichia coli comprising a nucleic acid having the sequence as shown in SEQ ID NO: 255, and an Escherichia coli strain comprising inactivated genes acrB, acrD, acrF, mdtF, macB, emrB, mdtL, mdtK, bcr, ydeA, mdtM, yddA, yebQ, emrE, mdtD, sugE, ynfM, emrD, ydeF, mdtJ, ydiM, mdtB, mdlA, emrY, mdfA, fsr, mdtG, mdtH, yieO, mdlB, mdtO, yojI, yajR, ydhC, and cusA, wherein at least one of acrB, acrD, acrF, mdtF, macB, emrB, mdtL, mdtK, bcr, ydeA, mdtM, yddA, yebQ, emrE, mdtD, sugE, ynfM, emrD, ydeF, mdtJ, ydiM, mdtB, mdlA, emrY, mdfA, fsr, mdtG, mdtH, yieO, mdlB, mdtO, yojI, yajR, ydhC, and cusA, is reactivated (Strain B); and/or
[0151] iii) contacting the compound with Strain A or the Escherichia coli strain deposited under IDAC accession number 310522-01 or IDAC accession number 070623-01, or an Escherichia coli comprising a nucleic acid having the sequence as shown in SEQ ID NO: 255, and an Escherichia coli strain comprising inactivated genes acrB, acrD, acrF, mdtF, macB, emrB, mdtL, mdtK, bcr, ydeA, mdtM, yddA, yebQ, emrE, mdtD, sugE, ynfM, emrD, ydeF, mdtJ, ydiM, mdtB, mdlA, emrY, mdfA, fsr, mdtG, mdtH, yieO, mdlB, mdtO, yojI, yajR, ydhC, and cusA, wherein one of acrB, acrD, acrF, mdtF, macB, emrB, mdtL, mdtK, bcr, ydeA, mdtM, yddA, yebQ, emrE, mdtD, sugE, ynfM, emrD, ydeF, mdtJ, ydiM, mdtB, mdlA, emrY, mdfA, fsr, mdtG, mdtH, yieO, mdlB, mdtO, yojI, yajR, ydhC, and cusA, is reactivated (Strain C); and
[0152] (b) detecting viability of each of the Escherichia coli;
[0153] wherein the compound is identified as an antibacterial agent if the compound decreases viability of wild-type less than Strain A or the Escherichia coli strain deposited under IDAC accession number 310522-01 or IDAC accession number 070623-01, or comprising or an Escherichia coli a nucleic acid having the sequence as shown in SEQ ID NO: 255;
[0154] optionally wherein the compound is identified as an antibacterial agent if the compound decreases viability of Strain B, less than Strain A or the Escherichia coli strain deposited under IDAC accession number 310522-01 or IDAC accession number 070623-01, or an Escherichia coli comprising a nucleic acid having the sequence as shown in SEQ ID NO: 255;
[0155] optionally wherein the compound is identified as an antibacterial agent if the wild-type Escherichia coli or Strain B is resistant to the compound, and the compound decreases the viability of Strain A or the Escherichia coli strain deposited under IDAC accession number 310522-01 or IDAC accession number 070623-01, or an Escherichia coli comprising a nucleic acid having the sequence as shown in SEQ ID NO: 255.

[0156] Also provided is a method for creating an Escherichia coli strain producing one or more efflux pump, comprising reactivating one of acrB, acrD, acrF, mdtF, macB, emrB, mdtL, mdtK, bcr, ydeA, mdtM, yddA, yebQ, emrE, mdtD, sugE, ynfM, emrD, ydeF, mdtJ, ydiM, mdtB, mdlA, emrY, mdfA, fsr, mdtG, mdtH, yieO, mdlB, mdtO, yojI, yajR, ydhC, and cusA in the Escherichia coli strain EKO-35.

[0157] In some embodiments, the reactivation comprises introducing one or more of acrB, acrD, acrF, mdtF, macB, emrB, mdtL, mdtK, bcr, ydeA, mdtM, yddA, yebQ, emrE, mdtD, sugE, ynfM, emrD, ydeF, mdtJ, ydiM, mdtB, mdlA, emrY, mdfA, fsr, mdtG, mdtH, yieO, mdlB, mdtO, yojI, yajR, ydhC, and cusA, optionally by reversing the inactivation, optionally by re-introducing the gene back in genome with the same promoter or a different promoter, at the same locus or a different locus, optionally by introducing a knock down-resistant version of the gene.

[0158] Also provided is a method for creating an efflux pump deficiency E. coli strain, the method comprises inactivating at least 20, 21, 22, 23, 24, 25, 26, 27, 28, 29, 30, 31, 32, 33, 34, or 35 genes of acrB, acrD, acrF, mdtF, macB, emrB, mdtL, mdtK, bcr, ydeA, mdtM, yddA, yebQ, emrE, mdtD, sugE, ynfM, emrD, ydeF, mdtJ, ydiM, mdtB, mdlA, emrY, mdfA, fsr, mdtG, mdtH, yieO, mdlB, mdtO, yojI, yajR, ydhC, and cusA. mdlA, emrY, mdfA, fsr, mdtG, mdtH, yieO, mdlB, mdtO, yojI, yajR, ydhC, and cusA. In some embodiments, the method comprises inactivating at least 20 genes of acrB, acrD, acrF, mdtF, macB, emrB, mdtL, mdtK, bcr, ydeA, mdtM, yddA, yebQ, emrE, mdtD, sugE, ynfM, emrD, ydeF, mdtJ, ydiM, mdtB, mdlA, emrY, mdfA, fsr, mdtG, mdtH, yieO, mdlB, mdtO, yojI, yajR, ydhC, and cusA. In some embodiments, the method comprises inactivating at least 21 genes of acrB, acrD, acrF, mdtF, macB, emrB, mdtL, mdtK, bcr, ydeA, mdtM, yddA, yebQ, emrE, mdtD, sugE, ynfM, emrD, ydeF, mdtJ, ydiM, mdtB, mdlA, emrY, mdfA, fsr, mdtG, mdtH, yieO, mdlB, mdtO, yojI, yajR, ydhC, and cusA. In some embodiments, the method comprises inactivating at least 22 genes of acrB, acrD, acrF, mdtF, macB, emrB, mdtL, mdtK, bcr, ydeA, mdtM, yddA, yebQ, emrE, mdtD, sugE, ynfM, emrD, ydeF, mdtJ, ydiM, mdtB, mdlA, emrY, mdfA, fsr, mdtG, mdtH, yieO, mdlB, mdtO, yojI, yajR, ydhC, and cusA. In some embodiments, the method comprises inactivating at least 23 genes of acrB, acrD, acrF, mdtF, macB, emrB, mdtL, mdtK, bcr, ydeA, mdtM, yddA, yebQ, emrE, mdtD, sugE, ynfM, emrD, ydeF, mdtJ, ydiM, mdtB, mdlA, emrY, mdfA, fsr, mdtG, mdtH, yieO, mdlB, mdtO, yojI, yajR, ydhC, and cusA. In some embodiments, the method comprises inactivating at least 24 genes of acrB, acrD, acrF, mdtF, macB, emrB, mdtL, mdtK, bcr, ydeA, mdtM, yddA, yebQ, emrE, mdtD, sugE, ynfM, emrD, ydeF, mdtJ, ydiM, mdtB, mdlA, emrY, mdfA, fsr, mdtG, mdtH, yieO, mdlB, mdtO, yojI, yajR, ydhC, and cusA. In some embodiments, the method comprises inactivating at least 25 genes of acrB, acrD, acrF, mdtF, macB, emrB, mdtL, mdtK, bcr, ydeA, mdtM, yddA, yebQ, emrE, mdtD, sugE, ynfM, emrD, ydeF, mdtJ, ydiM, mdtB, mdlA, emrY, mdfA, fsr, mdtG, mdtH, yieO, mdlB, mdtO, yojI, yajR, ydhC, and cusA. In some embodiments, the method comprises inactivating at least 26 genes of acrB, acrD, acrF, mdtF, macB, emrB, mdtL, mdtK, bcr, ydeA, mdtM, yddA, yebQ, emrE, mdtD, sugE, ynfM, emrD, ydeF, mdtJ, ydiM, mdtB, mdlA, emrY, mdfA, fsr, mdtG, mdtH, yieO, mdlB, mdtO, yojI, yajR, ydhC, and cusA. In some embodiments, the method comprises inactivating at least 27 genes of acrB, acrD, acrF, mdtF, macB, emrB, mdtL, mdtK, bcr, ydeA, mdtM, yddA, yebQ, emrE, mdtD, sugE, ynfM, emrD, ydeF, mdtJ, ydiM, mdtB, mdlA, emrY, mdfA, fsr, mdtG, mdtH, yieO, mdlB, mdtO, yojI, yajR, ydhC, and cusA. In some embodiments, the method comprises inactivating at least 28 genes of acrB, acrD, acrF, mdtF, macB, emrB, mdtL, mdtK, bcr, ydeA, mdtM, yddA, yebQ, emrE, mdtD, sugE, ynfM, emrD, ydeF, mdtJ, ydiM, mdtB, mdlA, emrY, mdfA, fsr, mdtG, mdtH, yieO, mdlB, mdtO, yojI, yajR, ydhC, and cusA. In some embodiments, the method comprises inactivating at least 29 genes of acrB, acrD, acrF, mdtF, macB, emrB, mdtL, mdtK, bcr, ydeA, mdtM, yddA, yebQ, emrE, mdtD, sugE, ynfM, emrD, ydeF, mdtJ, ydiM, mdtB, mdlA, emrY, mdfA, fsr, mdtG, mdtH, yieO, mdlB, mdtO, yojI, yajR, ydhC, and cusA. In some embodiments, the method comprises inactivating at least 30 genes of acrB, acrD, acrF, mdtF, macB, emrB, mdtL, mdtK, bcr, ydeA, mdtM, yddA, yebQ, emrE, mdtD, sugE, ynfM, emrD, ydeF, mdtJ, ydiM, mdtB, mdlA, emrY, mdfA, fsr, mdtG, mdtH, yieO, mdlB, mdtO, yojI, yajR, ydhC, and cusA. In some embodiments, the method comprises inactivating at least 31 genes of acrB, acrD, acrF, mdtF, macB, emrB, mdtL, mdtK, bcr, ydeA, mdtM, yddA, yebQ, emrE, mdtD, sugE, ynfM, emrD, ydeF, mdtJ, ydiM, mdtB, mdlA, emrY, mdfA, fsr, mdtG, mdtH, yieO, mdlB, mdtO, yojI, yajR, ydhC, and cusA. In some embodiments, the method comprises inactivating at least 32 genes of acrB, acrD, acrF, mdtF, macB, emrB, mdtL, mdtK, bcr, ydeA, mdtM, yddA, yebQ, emrE, mdtD, sugE, ynfM, emrD, ydeF, mdtJ, ydiM, mdtB, mdlA, emrY, mdfA, fsr, mdtG, mdtH, yieO, mdlB, mdtO, yojI, yajR, ydhC, and cusA. In some embodiments, the method comprises inactivating at least 33 genes of acrB, acrD, acrF, mdtF, macB, emrB, mdtL, mdtK, bcr, ydeA, mdtM, yddA, yebQ, emrE, mdtD, sugE, ynfM, emrD, ydeF, mdtJ, ydiM, mdtB, mdlA, emrY, mdfA, fsr, mdtG, mdtH, yieO, mdlB, mdtO, yojI, yajR, ydhC, and cusA. In some embodiments, the method comprises inactivating at least 34 genes of acrB, acrD, acrF, mdtF, macB, emrB, mdtL, mdtK, bcr, ydeA, mdtM, yddA, yebQ, emrE, mdtD, sugE, ynfM, emrD, ydeF, mdtJ, ydiM, mdtB, mdlA, emrY, mdfA, fsr, mdtG, mdtH, yieO, mdlB, mdtO, yojI, yajR, ydhC, and cusA. In some embodiments, the method comprises inactivating all 35 genes of acrB, acrD, acrF, mdtF, macB, emrB, mdtL, mdtK, bcr, ydeA, mdtM, yddA, yebQ, emrE, mdtD, sugE, ynfM, emrD, ydeF, mdtJ, ydiM, mdtB, mdlA, emrY, mdfA, fsr, mdtG, mdtH, yieO, mdlB, mdtO, yojI, yajR, ydhC, and cusA. In some embodiments, the method comprises inactivating genes in the following order: ΔyajR; mdtO; ydhC; emrE; yojI; mdtD, sugE; ynfM, emrD, ydeF; mdlA, emrY; mdtK, bcr; mdtG; mdtH, mdlB, macB, yddA; fsr; ydiM; yieO; mdfA; mdtM; mdtJ; emrB, mdtB, mdtL; yebQ, cusA; mdtF; ydeA; acrF; acrD, and acrB.

### EXAMPLES

[0159] The following non-limiting Examples are illustrative of the present disclosure:

### Example 1. Development and Utilization of EKO-35

### Materials and Methods

### Strains, Plasmids, and Growth Conditions

[0160] Bacterial strains and plasmids used in this disclosure are provided in Table 2. E. coli K-12 str. BW25113, the parental strain of the Keio Collection (Baba, T. et al., 2006) was used as the background for generation of EKO-35. Specifically, an ΔacrB mutant from the Keio Collection was used as the first deletion mutant. E. coli TOP10 or E. coli DH5a strains were used as routine cloning hosts. E. coli strains for resistance cassette amplification were obtained from the Keio Collection, P. aeruginosa PAO1 was provided by Dr. Cezar Khursigara (University of Guelph). An E. coli K-12 str. BW25113 harboring the fhuA ΔC/Δ4L gene under the control of the constitutive synthetic promoter BBa_J23104 was used as a source for the ‘Pore’ (Johnson, J. W. et al., 2022). Plasmids for CRISPR-Cas9 mediated counterselection, pCas and pTargetF, were purchased from Addgene (Jiang, Y. et al., 2015). Plasmids for the λ-Red recombinase system, pKD46 and pCP20 (Datsenko, K. A. & Wanner, B. L, 2000), and expression of efflux genes, pINT2 and pGDP2 were used (Cox, G. et al., 2017). Strains were routinely grown in Lysogeny broth (LB) (Bioshop) at 37° C. or For optimal aeration, broth cultures were grown with aeration at 220 rpm. For growth profiling, microtiter plates were incubated at 37° C. or 25° C. with continuous linear shaking at 600 rpm. For susceptibility testing, microtiter plates were grown at 37° C. with continuous linear shaking at 900 rpm. Ampicillin (100 μg/mL) (Bioshop), kanamycin (50 μg/mL) (Sigma-Aldrich), spectinomycin (50 μg/mL) (Bioshop), and gentamicin (10 μg/mL) (BioBasic) were used at the listed concentrations for selection of resistance markers. For nutrient-limited conditions, strains were grown in M9 (Bioshop) supplemented with 2 mM MgSO4 (Bioshop), 0.1 mM CaCl₂) (Bioshop) and glucose (w/v) (Bioshop). To profile growth in amino acid-limited medium supplemented with iron, MOPS medium (TEKNOVA) was utilized. Buffered “low-salt” medium was prepared (Lewinson, O. et al., 2014) with 100 mM of the appropriate buffer [pH 5.0, homopiperazine-N,N=-bis-2-(ethanesulfonic acid) (HOMOPIPES), pH 5.5 to 6.5, 2-(N-morpholino)ethanesulfonic acid (MES); pH 7.0 to 7.5, 3-(N-morpholino)propanesulfonic acid (MOPS)]. For profiling growth at pH 8.0 to 9.0, 1,3-bis(tris(hydroxymethyl)methylamino)propane (Bis-tris propane) was used at 50 mM due to toxicity at higher concentrations. Susceptibility testing was conducted in cation-adjusted Mueller Hinton II Broth (MHB II) (BD Difco).

TABLE 1
Measurement of growth kinetics revealed statistically significant
differences between EKO-35 and the wild-type strain. Generation
time and the duration of the lag phase for each strain are
shown in minutes. The measurements represent the mean +
standard deviation for three biological replicates.

| | | | |
|---|---|---|---|
| | Generation | Lag | |
| Strain | time (min) | phase (min) | Final OD600nm |

Nutrient-rich medium at 37° C.

| | | | |
|---|---|---|---|
| K-12 | 26.54 ± 0.454 | 204.8 ± 2.969 | 0.741 ± 0.066 |
| EKO-35 | 28.33 ± 0.911 | 265.8 ± 3.285 | 0.725 ± 0.048 |
| P-value | 4.00 × 10⁻² | 1.83 × 10⁻⁵ | 0.178* |

Nutrient-rich medium at 25° C.

| | | | |
|---|---|---|---|
| K-12 | 83.06 ± 6.06 | 592.3 ± 6.536 | 0.979 ± 0.0172 |
| EKO-35 | 171.51 ± 13.08 | 809.5 ± 4.40 | 1.082 ± 0.0029 |
| P-value | 4.44 × 10⁻⁴ | 1.16 × 10⁻⁶ | 5.13 × 10⁻⁴ |

Nutrient-rich medium at 37° C. with 1% O₂

| | | | |
|---|---|---|---|
| K-12 | 24.85 ± 1.263 | 185.0 ± 5.122 | 0.525 ± 0.009 |
| EKO-35 | 37.15 ± 0.849 | 279.7 ± 9.516 | 0.452 ± 0.008 |
| P-value | 1.51 × 10⁻⁴ | 1.10 × 10⁻⁴ | 4.98 × 10⁻⁴ |

Nutrient-rich medium with KNO₃ supplementation at 37° C. with 1% O₂

| | | | |
|---|---|---|---|
| K-12 | 26.87 ± 1.035 | 209.0 ± 2.165 | 0.502 ± 0.007 |
| EKO-35 | 43.52 ± 1.962 | 315.4 ± 4.048 | 0.293 ± 0.004 |
| EKO-35 | 30.10 ± 1.137 | 276.0 ± 6.187 | 0.331 ± 0.006 |
| araC::MdtEF | | | |
| P-value | 2.02 × 10⁻⁴ | 2.30 × 10⁻⁶ | 1.83 × 10⁻⁶ |
| ^{a}P-value | 5.09 × 10⁻⁴ | 7.70 × 10⁻⁴ | 6.47 × 10⁻⁴ |

Nutrient-limited medium at 37° C.

| | | | |
|---|---|---|---|
| K-12 | 56.5 ± 3.020 | 841.1 ± 7.401 | 0.585 ± 0.030 |
| EKO-35 | 52.05 ± 1.058 | 1137.8 ± 9.803 | 0.492 ± 0.004 |
| P-value | 0.074* | 1.95 × 10⁻⁶ | 6.13 × 10⁻³ |

Amino acid-limited medium supplemented with iron at 37° C.

| | | | |
|---|---|---|---|
| K-12 | 58.40 ± 1.779 | 848.6 ± 17.19 | 0.688 ± 0.118 |
| EKO-35 | 70.45 ± 1.875 | 1242.9 ± 29.68 | 0.818 ± 0.006 |
| P-value | 1.27 × 10⁻³ | 0.913* | 0.130* |

Nutrient-limited medium at 25° C.

| | | | |
|---|---|---|---|
| K-12 | 219.42 ± 26.09 | 2603.55 ± 64.90 | 0.591 ± 0.056 |
| EKO-35 | 231.27 ± 18.49 | 2539.27 ± 82.34 | 0.666 ± 0.173 |
| P-value | 9.18 × 10⁻² | 1.87 × 10⁻¹ | 3.41 × 10⁻¹ |

Nutrient-limited medium at 37° C. with 5% O₂

| | | | |
|---|---|---|---|
| K-12 | 80.79 ± 3.885 | 1541.2 ± 26.27 | 0.321 ± 0.002 |
| EKO-35 | 134.70 ± 2.331 | 2420.9 ± 36.30 | 0.314 ± 0.010 |
| EKO-35 | 114.94 ± 2.603 | 2133.09 ± 71.84 | 0.375 ± 0.006 |
| araC::MdtEF | | | |
| P-value | 3.27 × 10⁻⁵ | 5.09 × 10⁻⁶ | 0.29* |
| ^{a}P-value | 6.09 × 10⁻⁴ | 5.06 × 10⁻³ | 8.40 × 10⁻⁴ |

* non-significant P-values.
Statistical significance was assessed using a two-tailed Student's t-test (P-value ≤ 0.05).
^{a}P-value for EKO-35 compared to EKO-35 araC::MdtEF

TABLE 2
Strains and plasmids used in this Example.

| | |
|---|---|
| Genotype or Description | Source |

Strains

| | | |
|---|---|---|
| E. coli K-12 str. | The parental strain of the KEIO collection | Baba, T. et |
| BW25113 | | al. (2006) |
| E. coli TOP10 | Cloning host, mcrA deficient for increased | Thermo |
| | efficiency in foreign DNA uptake | Fisher |
| | | Scientific |
| E. coli DH5a | Cloning host, endA deficient for high quality | Thermo |
| | DNA preparations | Fisher |
| | | Scientific |
| E. coli EKO-35 | BW25113 efflux deficient derivative (AacrB; | This |
| | acrD; acrF; mdtF; macB; emrB; mdtL; mdtK; | disclosure |
| | bcr; ydeA; mdtM; yddA; yebQ; emrE; mdtD; | |
| | sugE; ynfM; emrD; ydeF; mdtJ; ydiM; mdtB; | |
| | mdIA; emrY; mdfA; fsr; mdtG; mdtH; yieO; | |
| | mdlB, mdtO, yojI, yajR, ydhC; cusA) | |
| E. coli δtolC | BW25113 derivative from the KEIO collection | Baba, T. et |
| | | al. (2006) |
| E. coli pore | BW25115 attTn7::mini-Tn7T (Gm^{r}-PBBa_J23104- | Johnson, J. |
| | fhuA AC/A4L) | W. et al. |
| | | (2022) |
| P. aeruginosa PAO1 | Derivative of the Australian PAO isolate | Stover, C. |
| | | K. et al. |
| | | (2000) |

Plasmids

| | | |
|---|---|---|
| pKD46 | Amp^{r}, temperature sensitive, arabinose- | Datsenko, |
| | induced expression of the A-Red recombinase | K. A. & |
| | for homologous recombination | Wanner, B. |
| | | L. (2000) |
| pCP20 | Amp^{r}, temperature sensitive: permissive | Cherepanov |
| | (30° C.), non-permissive (42° C.). Contains flp | P. P. & |
| | from Saccharomyces cerevisiae for resistance | Wackernag |
| | cassette removal | el, W. |
| | | (1995) |
| pCas | Kan^{r}, temperature sensitive permissive (30° C.), | Jiang, Y. et |
| | non-permissive (37° C.), arabinose-induced | al. (2015) |
| | expression of the λ-Red recombinase for | |
| | homologous recombination. Constitutive | |
| | expression of Cas-9 | |
| pTargetF | Spec^{r}, modifiable by PCR to contain N20 | Jiang, Y. et |
| | sequence recognizable by Cas-9 | al. (2015) |
| pTargetF-emrE | Spec^{r}, modified by PCR to contain an N20 | This |
| | sequence recognizable by Cas-9 to target a | disclosure |
| | PAM site within emrE | |
| pTargetF-mdtD | Spec^{r}, modified by PCR to contain an N20 | This |
| | sequence recognizable by Cas-9 to target a | disclosure |
| | PAM site within mdtD | |
| pTargetF-sugE | Spec^{r}, modified by PCR to contain an N20 | This |
| | sequence recognizable by Cas-9 to target a | disclosure |
| | PAM site within sugE | |
| pTargetF-ynfM | Spec^{r}, modified by PCR to contain an N20 | This |
| | sequence recognizable by Cas-9 to target a | disclosure |
| | PAM site within ynfM | |
| pTargetF-emrD | Spec^{r}, modified by PCR to contain an N20 | This |
| | sequence recognizable by Cas-9 to target a | disclosure |
| | PAM site within emrD | |
| pTargetF-ydeF | Spec^{r}, modified by PCR to contain an N20 | This |
| | sequence recognizable by Cas-9 to target a | disclosure |
| | PAM site within ydeF | |
| pTargetF-mdtJ | Spec^{r}, modified by PCR to contain an N20 | This |
| | sequence recognizable by Cas-9 to target a | disclosure |
| | PAM site within mdtIJ | |
| pTargetF-ydiM | Spec^{r}, modified by PCR to contain an N20 | This |
| | sequence recognizable by Cas-9 to target a | disclosure |
| | PAM site within ydiM | |
| pTargetF-mdtB | Spec^{r}, modified by PCR to contain an N20 | This |
| | sequence recognizable by Cas-9 to target a | disclosure |
| | PAM site within mdtB | |
| pTargetF-mdIA | Spec^{r}, modified by PCR to contain an N20 | This |
| | sequence recognizable by Cas-9 to target a | disclosure |
| | PAM site within mdlA | |
| pTargetF-emrY | Spec^{r}, modified by PCR to contain an N20 | This |
| | sequence recognizable by Cas-9 to target a | disclosure |
| | PAM site within emrY | |
| pTargetF-mdfA | Spec^{r}, modified by PCR to contain an N20 | This |
| | sequence recognizable by Cas-9 to target a | disclosure |
| | PAM site within mdfA | |
| pTargetF-fsr | Spec^{r}, modified by PCR to contain an N20 | This |
| | sequence recognizable by Cas-9 to target a | disclosure |
| | PAM site within fsr | |
| pTargetF-mdtG | Spec^{r}, modified by PCR to contain an N20 | This |
| | sequence recognizable by Cas-9 to target a | disclosure |
| | PAM site within mdtG | |
| pTargetF-mdtH | Spec^{r}, modified by PCR to contain an N20 | This |
| | sequence recognizable by Cas-9 to target a | disclosure |
| | PAM site within mdtH | |
| pTargetF-yieO | Spec^{r}, modified by PCR to contain an N20 | This |
| | sequence recognizable by Cas-9 to target a | disclosure |
| | PAM site within yieO | |
| pTargetF-mdlB | Spec^{r}, modified by PCR to contain an N20 | This |
| | sequence recognizable by Cas-9 to target a | disclosure |
| | PAM site within mdlB | |
| pTargetF-mdtO | Spec^{r}, modified by PCR to contain an N20 | This |
| | sequence recognizable by Cas-9 to target a | disclosure |
| | PAM site within mdtO | |
| pTargetF-yojH | Spec^{r}, modified by PCR to contain an N20 | This |
| | sequence recognizable by Cas-9 to target a | disclosure |
| | PAM site within yojH | |
| pTargetF-yojI | Spec^{r}, modified by PCR to contain an N20 | This |
| | sequence recognizable by Cas-9 to target a | disclosure |
| | PAM site within yojI | |
| pTargetF-yajR | Spec^{r}, modified by PCR to contain an N20 | This |
| | sequence recognizable by Cas-9 to target a | disclosure |
| | PAM site within yajR | |
| pTargetF-ydhC | Spec^{r}, modified by PCR to contain an N20 | This |
| | sequence recognizable by Cas-9 to target a | disclosure |
| | PAM site within ydhC | |
| pTargetF-cusA | Spec^{r}, modified by PCR to contain an N20 | This |
| | sequence recognizable by Cas-9 to target a | disclosure |
| | PAM site within cusA | |
| PINT2 | Amp^{r}, enables chromosomal integration into | Cox, G. et |
| | the arabinose operon via homologous | al. (2017) |
| | recombination. Genes of interest are ligated | |
| | into the MCS, downstream of a Kan^{r} resistance | |
| | cassette | |
| pINT2-acrB | Amp^{r}, contains acrB for chromosomal | This |
| | integration | disclosure |
| pINT2-acrB D408A | Ampr, contains acrBD408A for chromosomal | This |
| | integration | disclosure |
| PINT2-acrD | Amp^{r}, contains acrD for chromosomal | This |
| | integration | disclosure |
| PINT2-acrEF | Amp^{r}, contains acrEF for chromosomal | This |
| | integration | disclosure |
| PINT2-mdtEF | Amp^{r}, contains mdtEF for chromosomal | This |
| | integration | disclosure |
| PINT2-emrKY | Amp^{r}, contains emrKY for chromosomal | This |
| | integration | disclosure |
| pINT2-mdtBC | Amp^{r}, contains mdtBC for chromosomal | This |
| | integration | disclosure |
| PINT2-macAB | Ampr, contains macAB for chromosomal | This |
| | integration | disclosure |
| pINT2-emrAB | Amp^{r}, contains emrAB for chromosomal | This |
| | integration | disclosure |
| PINT2-mexCD | Amp^{r}, contains mexCD from P. aeruginosa | This |
| | PAO1 for chromosomal integration | disclosure |
| pGDP2 | KanR, low-copy number plasmid that enables | Cox, G. et |
| | constitutive expression from P_{Lacl} constitutive | al. (2017) |
| | promoter. Genes of interest are ligated into the | |
| | MCS, downstream of a Kan^{r} resistance | |
| | cassette | |
| pGDP2-emrE | KanR, low-copy number plasmid contains emrE | This |
| | for constitutive expression | disclosure |

### Generation of an Efflux Deficient Strain

[0161] Generation of EKO-35 was achieved using a combination of the λ-Red recombinase system (Datsenko, K. A. & Wanner, B. L., 2000) and CRISPR-Cas9 counter-selection (Jiang, Y. et al., 2015). The efflux genes were inactivated in the order denoted in Table 3. All PCR reactions and restriction enzyme digests were prepared according to manufacturers' guidelines. Amplicons were purified using a GeneJET PCR purification kit (Thermo Fisher Scientific) according to manufacturer's guidelines. The 2×GB-AMP™ high-fidelity PaCeR™ polymerase Master Mix (GeneBio Systems Inc) and Taq 2× polymerase Master Mix (FroggaBio) were used according to the manufacturer's suggested guidelines.

[0162] For λ-Red recombineering, electrocompetent cells of the mutant strain of interest were transformed with 50 ng of pKD46 (Datsenko, K. A. & Wanner, B. L., 2003). A broth culture was grown to the mid exponential phase (OD600 nm˜0.5) in the presence of 2 mM arabinose and ampicillin to induce recombinase expression. Utilizing the PaCeR™ high-fidelity polymerase, and primers annealing 50 base pairs (bp) upstream and downstream of the gene of interest (Table 4), kanamycin resistance cassettes were amplified from the respective Keio strain. Amplicon size (1500 bp) was verified via gel electrophoresis and the remaining PCR product was purified. Recombinase induced electrocompetent cells were transformed with 250 ng of each amplicon (Bio-Rad MicroPulser, Ec1 setting, 1 mm electroporation cuvette (Fisher)). The cells were recovered and grown overnight on selective agar (LB with kanamycin) to identify gene disruptions. Successful gene knockouts were transformed with pCP20 (Table 2 “Strains and Plasmid)). A single colony was then inoculated into 3 mL of LB containing ampicillin and incubated at 30° C. to induce removal of the resistance cassette. Cassette removal was confirmed using PCR and primers annealing 250 bp upstream and downstream of the gene of interest (Table 4). Amplicon size (500 bp) for successful cassette removal was verified via gel electrophoresis. Efflux genes inactivated using the λ-Red recombinase system are indicated in Table 3.

[0163] For CRISPR-Cas9-mediated counterselection, the methodology described by Jiang et al. was modified for high-throughput screening of mutants (Jiang, Y. et al., 2015). CRISPR guide software (Benchling) was employed for selection of appropriate N20 sequences. pTargetF was modified via PCR to introduce an N20 for the gene of interest (Table 4). Amplicon size (2100 bp) was verified via gel electrophoresis, and the remaining PCR product was purified. To enable rapid screening of positive mutants and to disrupt the target gene, ssDNA repair oligos (˜100 bp in length) were designed to contain an AseI restriction site and three tandem stop codons (Table 4). All ssDNA repair oligos were purchased through Integrated DNA Technologies (IDT). Electrocompetent cells of the mutant strain of interest were transformed with 50 ng of pCas. A broth culture of each strain was grown to the mid exponential phase (OD600 nm˜0.5) in the presence of kanamycin and 10 mM arabinose to induce recombinase expression. To recombinase induced electrocompetent cells, 100 ng of pTargetF that was modified to contain the desired N20 sequence, and 2000 ng of repair ssDNA targeting the gene of interest were electroporated (Bio-Rad MicroPulser, Ec1 setting, 1 mm electroporation cuvette (Fisher)). The cultures were recovered in LB at 30° C. and propagated on selective agar (LB with kanamycin and spectinomycin) to identify successful gene disruptions. For high-throughput screening of colonies, Taq polymerase was used with primers annealing to the target region of each gene (Table 4). The amplicons were digested with AseI and successfully inactivated genes were identified via gel electrophoresis by digestion relative to a wild-type negative control. Insertion of the three tandem stop codons into the gene of interest was verified using Sanger sequencing at the Advanced Analysis Centre (AAC) (University of Guelph). Genes disrupted using CRISPR-Cas9-mediated counter selection are indicated in Table 3.

TABLE 3
Gene inactivation during the generation of EKO-35. For genes
inactivated using CRISPR-Cas9 mediated counter selection,
the location of the inserted stop codons are noted.

| | Gene | | Stop Codon |
|---|---|---|---|
| | Size | | Placement |
| Gene | (bp) | KO Method | (bp) |
| acrB | 3150 | λ-Red | N/A |
| acrD | 3114 | λ-Red | N/A |
| acrF | 3105 | λ-Red | N/A |
| mdtF | 3114 | λ-Red | N/A |
| macB | 1947 | λ-Red | N/A |
| emrB | 1539 | λ-Red | N/A |
| mdtL | 1176 | λ-Red | N/A |
| mdtK | 1374 | λ-Red | N/A |
| bcr | 1191 | λ-Red | N/A |
| ydeA | 1191 | λ-Red | N/A |
| mdtM | 1233 | λ-Red | N/A |
| yddA | 1686 | λ-Red | N/A |
| yebQ | 1374 | λ-Red | N/A |
| emrE | 333 | CRISPR-Cas9 | 93 |
| mdtD | 1416 | CRISPR-Cas9 | 26 |
| sugE | 318 | CRISPR-Cas9 | 93 |
| ynfM | 1254 | CRISPR-Cas9 | 115 |
| emrD | 1185 | CRISPR-Cas9 | 206 |
| ydeF | 1188 | CRISPR-Cas9 | 43 |
| mdtJ | 366 | CRISPR-Cas9 | 98 |
| ydiM | 1215 | CRISPR-Cas9 | 124 |
| mdtB | 3123 | CRISPR-Cas9 | 160 |
| mdlA | 1773 | CRISPR-Cas9 | 69 |
| emrY | 1539 | CRISPR-Cas9 | 41 |
| mdfA | 1233 | CRISPR-Cas9 | 116 |
| fsr | 1221 | CRISPR-Cas9 | 242 |
| mdtG | 1227 | CRISPR-Cas9 | 276 |
| mdtH | 1209 | CRISPR-Cas9 | 136 |
| yieO | 1428 | CRISPR-Cas9 | 177 |
| mdlB | 1782 | CRISPR-Cas9 | 72 |
| mdtO | 2052 | CRISPR-Cas9 | 75 |
| yojH* | 1647 | CRISPR-Cas9 | 187 |
| yojI | 1644 | CRISPR-Cas9 | 25 |
| yajR | 1365 | CRISPR-Cas9 | 47 |
| ydhC | 1212 | CRISPR-Cas9 | 90 |
| cusA | 3144 | CRISPR-Cas9 | 400 |

*YojH was repaired due to lack of supporting evidence of efflux pump activity.

TABLE 4
Primers and oligonucleotides used in this Example.

| | | SEQ ID |
|---|---|---|
| Primer | Sequence (5′-3′) | NO: |
| AcrB Seq Up | CTGAAACAAGAGAACGGCAAAGGC | 1 |
| AcrB Seq | CTTACTGACCTGGACTTGCCCTCTCG | 2 |
| Low | | |
| AcrD 50 Up | CGCTACAGTGAAGCAAGTCAAGC | 3 |
| AcrD 50 Low | CCGCTGAGCAGGTTCTTAATCG | 4 |
| AcrD Seq Up | CGCTGACTTTTTCACAACCTTCCG | 5 |
| AcrD Seq | GTCCCCCGGAGGTAGTCATCGCAGC | 6 |
| Low | | |
| AcrF 50 Up | GGTTAAAGCCACTACCGATACCCC | 7 |
| AcrF 50 Low | GAAGGGAGCGGGAACTATAGAAAGC | 8 |
| AcrF Seq Up | GAGGCTGAAGCAATCCGTAGAGC | 9 |
| AcrD Seq | GATACTGTATCGTTAAAAAGAGCGCG | 10 |
| Low | | |
| MdtF KO Up | GCACGAGCAATTTCCTCCAGCCAGG | 11 |
| MdtF KO | GGTTGTTGAGTGGTGAATGGTTAGC | 12 |
| Low | | |
| MdtF 200 Up | GATGTCGTGCAGCTACGCGAAAT | 13 |
| MdtF 200 | ACGAATGGCTGGAGTGGTTTC | 14 |
| Low | | |
| MacB KO Up | CGATACCGATGTTGAGATTGTCAAAGG | 15 |
| MacB KO | GCATAGCTCTTCTGTCTCATTGTGTAC | 16 |
| Low | | |
| MacB 200 Up | ATGTGCTGACGATCCCTCTGTC | 17 |
| MacB 200 | TTCGCTCATTATTCCACCATTCAG | 18 |
| Low | | |
| EmrB KO Up | GGCACCTGTCAATAAACTGATCG | 19 |
| EmrB KO | GCACATCTAGTCAGTAAACTATCTTCAC | 20 |
| Low | | |
| EmrB 200 Up | CGTTCAGCGTCTGCCTGTGCG | 21 |
| EmrB 200 | GCGGCAATGGAAGACGTGCTG | 22 |
| Low | | |
| MdtL KO Up | GGCAACTCGCCTGATCCTCCTTC | 23 |
| MdtL KO | ATCCGCTTCGCCGCTTTGGTTAC | 24 |
| Low | | |
| MdtL 200 Up | CATTCTCTTTGGTATAACCGTG | 25 |
| MdtL 200 | TTTGCTCCATGCTGACCAT | 26 |
| Low | | |
| MdtK KO Up | TTCACTGGAGAATTAATAAATCC | 27 |
| MdtK KO | GACGGGATTGGCGCAACGCTCC | 28 |
| Low | | |
| MdtK 200 Up | GAAATCAGTTAAGACATTCTGTTC | 29 |
| MdtK 200 | CATGTGCAACTGAAAGTGAAAC | 30 |
| Low | | |
| Bcr KO Up | GGAATGATAGATTTGTGGTTGAC | 31 |
| Bcr KO Low | CGGTGAATATCGTCCGTTAACTG | 32 |
| Bcr 200 Up | CCTCTATGGCTCTGATTTAAGTA | 33 |
| Bcr 200 Low | GTTATCATCAGGTGAAACGCAT | 34 |
| YdeA KO Up | GAAAGAATCAGCGTCAGAGAAA | 35 |
| YdeA KO | ATTAACGGCATCCTGGAAATC | 36 |
| Low | | |
| YdeA 200 Up | CACGAAGACCCTGGTGAAA | 37 |
| YdeA 200 | CGCCGCCGCTGATCTTT | 38 |
| Low | | |
| MdtM KO Up | GCCCTTCTCACCTGCCT | 39 |
| MdtM KO | GCGTAACGACAAAGGTAGCAG | 40 |
| Low | | |
| MdtM 250 Up | CAGCGTAACGACAAAGGTAGCAG | 41 |
| MdtM 200 | ACCACCGCAAACCAGTC | 42 |
| Low | | |
| YddA KO Up | CATCAGTAAATCATTGCCATAG | 43 |
| YddA KO | GACGCCAGGAATAAGAAC | 44 |
| Low | | |
| YddA 250 Up | TGTCGGGTGTTTCGTCAT | 45 |
| YddA 250 | TCGCTGATATTGCCATTC | 46 |
| Low | | |
| YebQ KO Up | TAGTTACAATTCTGCGACATCC | 47 |
| YebQ KO | CGCTCAGTGAGTTTGTTCAT | 48 |
| Low | | |
| YebQ 200 Up | CACGGAAGATACAGAATCAGG | 49 |
| YebQ 200 | CAGCTATGAACCGCAAGAA | 50 |
| Low | | |
| EmrE N20 Up | AGTTTTCAGAAGGTTTTACAGTTTTAGAGCTAGAAATAGCA | 51 |
| | AG | |
| EmrE N20 | TGTAAAACCTTCTGAAAACTACTAGTATTATACCTAGGACT | 52 |
| Low | GAG | |
| EmrE ssDNA | ATA ACA AAT AAT TGT ACC AAC AGA TGG CCA | 53 |
| Repair | TAA TTA TTA TTA ATT TGT AAA ACC TTC TGA | |
| | AAA CTT CAT TAA GGT TGT ACC AAT GAC CTT | |
| | TAT TAT TAC TGC | |
| EmrE 200 Up | CGGTTCGCTACCAGAGAAGAATG | 54 |
| EmrE 200 | CATGGTGACACCTGCTAACGTATGC | 55 |
| Low | | |
| MdtD N20 Up | CCACAATCCACAATTGCCAAGTTTTAGAGCTAGAAATAGCA | 56 |
| | AG | |
| MdtD N20 | TTGGCAATTGTGGATTGTGGACTAGTATTATACCTAGGACT | 57 |
| Low | GAG | |
| MdtD ssDNA | TG TCC AGC GAC TGC ATA AAG AAG CCG AAA GCC | 58 |
| Repair | ACA ATC CAC AAT TGC CAA TTA TTA TTA ATT | |
| | GGT GCT GTC GGG AAG ATC TGT CAT TTA CTC | |
| | GGT TAC CGT TTG TTT AGG TT | |
| MdtD 200 Up | CGCCCGATTATGATGACTAC | 59 |
| MdtD 200 | CTGAAAGACAAAGCGATCATTG | 60 |
| Low | | |
| SugE N20 Up | CGTCAAACGACTAAAGCCGTGTTTTAGAGCTAGAAATAGCA | 61 |
| | AG | |
| SugE N20 | CGTCAAACGACTAAAGCCGTACTAGTATTATACCTAGGACT | 62 |
| Low | GAG | |
| SugE ssDNA | GAC AAT CAT CGC CGT CAC AGT AAT AAC ACT | 63 |
| Repair | CGG CGT CAA ACG ACT AAA GCC GTG TTA TTA | |
| | TTA ATT ATA TTT CAG GCC AAC GGC CCA TAC | |
| | CAC TTC CAG CAG ACC AGC AAT AAC TAA GAT | |
| SugE 200 Up | CGCAGCAACGAAAGCGCA | 64 |
| YnfM N20 Up | TCCGGCAGAGAACAGCGCCAGTTTTAGAGCTAGAAATAGCA | 65 |
| | AG | |
| YnfM N20 | TGGCGCTGTTCTCTGCCGGAACTAGTATTATACCTAGGACT | 66 |
| Low | GAG | |
| YnfM ssDNA | CTG CAC ACA ATA GAG AAG TGC AAA TGT TGC | 67 |
| Repair | CAG TCC GGC AGA GAA CAG CGC CAG TTA TTA | |
| | TTA ATT GAC GCG CAT AAA TTG CGG CGT ACC | |
| | GCG TTT AAT AAA TTG ATT TGG CTG AGA AAT | |
| YnfM 200 Up | GTTGCGAAATATTCAGGC | 68 |
| YnfM 200 | AAAGCAGTAGAATAACTGC | 69 |
| Low | | |
| EmrD N20 | TCACCGGTCGGCGGCCCACGGTTTTAGAGCTAGAAATAGCA | 70 |
| Up | AG | |
| EmrD N20 | CGTGGGCCGCCGACCGGTGAACTAGTATTATACCTAGGACT | 71 |
| Low | GAG | |
| EmrD ssDNA | CGT TGC CAG CAT AAA AAT GGA CAT TCC GAC | 72 |
| Repair | GAG GAT CAC CGG TCG GCG GCC CAC GCG TTA | |
| | TTA TTA ATT GGA AAT CGG GCC ATA AAA CAG | |
| | CTG TGA GAC ACC GTA AGT CAG CAG ATA AGC | |
| | GCC | |
| EmrD 200 Up | CGATGCTGACGCATCTTATCCGCCC | 73 |
| EmrD 200 | GGTGCGGGCAGATATCAGTCGTATC | 74 |
| Low | | |
| YdeF N20 Up | GATGGTTAATAACAACGACGGTTTTAGAGCTAGAAATAGCA | 75 |
| | AG | |
| YdeF N20 | CGTCGTTGTTATTAACCATCACTAGTATTATACCTAGGACT | 76 |
| Low | GAG | |
| YdeF ssDNA | AAT GGT CAT AAA TGG CAG CGT AGC GCC GCG | 77 |
| Repair | TCC GAT GGT TAA TAA CAA CGA CGA TTA TTA | |
| | TTA ATT AAG AAG GGC GCT GGT AGA GCG TCG | |
| | TAG GGA TAA GTT CAT | |
| YdeF 250 Up | CTGATGGTTAATCCATACCCCAGC | 78 |
| YdeF Check | GATGCTCTGCATTACCAACAGCGTG | 79 |
| Internal | | |
| MdtJ N20 Up | AGCGTCAGTGAGGGAAATGGGTTTTAGAGCTAGAAATAGCA | 80 |
| | AG | |
| MdtJ N20 | CCATTTCCCTCACTGACGCTACTAGTATTATACCTAGGACT | 81 |
| Low | GAG | |
| MdtJ ssDNA | CGA CAG AGA AAT CAT CAC CAG CAT TAA AAT | 82 |
| Repair | AAA TTA TTA TTA ATT GCC ATT TCC CTC ACT | |
| | GAC GCT CGC CCA TTT CAT TGA CAG CGT ACC | |
| | GGT | |
| MdtJ 200 Up | CAATGCATAAGCGACAGACAAGTCG | 83 |
| MdtJ 200 | CATCCGCGATGACGAGAAGCAACAC | 84 |
| Low | | |
| YdiM N20 Up | GATAACTATCGAGACACCCGGTTTTAGAGCTAGAAATAGCA | 85 |
| | AG | |
| YdiM N20 Up | CGGGTGTCTCGATAGTTATCACTAGTATTATACCTAGGACT | 86 |
| | GAG | |
| YdiM ssDNA | CAA GAC ACT TAA TCG ACC AAT GCC CAG CGA | 87 |
| Repair | TGA GAT AAC TAT CGA GAC ACC CGC TTA TTA | |
| | TTA ATT ATT AGT CTG CCA AAG TGT CTC CAG | |
| | CGA GGC CAT ATT CAG | |
| YdiM Check | CAAGTGTGCCATTCCTGATCGTG | 88 |
| Up | | |
| YdiM Check | GAACCCACGGTGTAGATACTGAG | 89 |
| Up | | |
| MdtB N20 Up | GTAGAGCGTGACCACCTGAAGTTTTAGAGCTAGAAATAGCA | 90 |
| | AG | |
| MdtB N20 | TTCAGGTGGTCACGCTCTACACTAGTATTATACCTAGGACT | 91 |
| Low | GAG | |
| MdtB ssDNA | AAC GGC AGA GGT CAT GAC ATC CGG GCT GGC | 92 |
| Repair | ACC TGG GTA GAG CGT GAC CAC CTG AAT TTA | |
| | TTA TTA ATT CGG ATA GTC CAC TTC CGG CAG | |
| | CGC CGA AAC GGG CAG | |
| MdtB 200 Up | GTCAGAAAGTGGTGATCCGTGCAG | 93 |
| MdtB Check | GATCGCTCGGCAACAAGTTGGTCG | 94 |
| Low | | |
| MdIA N20 Up | CATCGCGATAATGACAAGCAGTTTTAGAGCTAGAAATAGCA | 95 |
| | AG | |
| MdIA N20 | GCTTGTCATTATCGCGATGACTAGTATTATACCTAGGACTG | 96 |
| Low | AGT | |
| MdIA ssDNA | ACC AAC CAC TTT TGG CGG AAC CAG TTG CAG | 97 |
| Repair | CAT CGC GAT AAT GAC AAG CAA TTA TTA TTA | |
| | ATT GAC AGC CCC GAG ATA GCG ACG CCA TTC | |
| | CCG ACG GAA ATA CCA GCT | |
| MdIA 300 Up | GTCACGGTGGTTACCGAAATGCCAG | 98 |
| MdIA Check | GCGTTAAACTGCCCTGCACCAC | 99 |
| Internal | | |
| EmrY N20 Up | ACTCCGGCACCATTAACCGGGTTTTAGAGCTAGAAATAGCA | 100 |
| | AG | |
| EmrY N20 | CCGGTTAATGGTGCCGGAGTACTAGTATTATACCTAGGACT | 101 |
| Low | GAG | |
| EmrY ssDNA | TTG CAT AAA TGT CGC TAA TGA CAA TGC AAT | 102 |
| Repair | AGT GAC GCA CCA TAA CGT TTA TTA TTA ATT | |
| | ACC GGT TAA TGG TGC CGG AGT TGA TTT AGT | |
| | GAT TGC CAT | |
| EmrY 200 Up | AGCGCAGAACAACTGCGTAATA | 103 |
| EmrY 200 | GTACGGGTTGAAGTTTCTCTTG | 104 |
| Low | | |
| MdfA N20 Up | GGCAACGATATGATTCAACCGTTTTAGAGCTAGAAATAGCA | 105 |
| | AG | |
| MdfA N20 | GGTTGAATCATATCGTTGCCACTAGTATTATACCTAGGACT | 106 |
| Low | GAG | |
| MdfA ssDNA | AAT GCC CGC CTG ATA TTG TTC CAC CAC GGC | 107 |
| Repair | CAA CAT TTA TTA TTA ATT GGG TTG AAT CAT | |
| | ATC GTT GCC GAT ATA GGT TGA AAA TTC GTA | |
| | AAG CAC CAG ACA | |
| MdfA_200_U | ATCGTCTTATTTCCCTCAAGC | 108 |
| p | | |
| MdfA_200_L | ATGTGCCGAGTGGATACAAAGT | 109 |
| OW | | |
| Fsr N20 Up | TCGCTACTGCAACCAGTGGTGTTTTAGAGCTAGAAATAGCA | 110 |
| | AG | |
| Fsr N20 Up | ACCACTGGTTGCAGTAGCGAACTAGTATTATACCTAGGACT | 111 |
| | GAG | |
| Fsr ssDNA | CGA CCA TGG CAT CGG ATA TTT ATC GGT CCA | 112 |
| Repair | GTA TTA TTA TTA ATT GAC CAC TGG TTG CAG | |
| | TAG CGA AGA GGC GAG CTG GAA GGT GAG GGT | |
| | TAT CAT GCC AAT CTG | |
| Fsr Check | GGTTAACAGCGCTAACGCCACG | 113 |
| Up | | |
| Fsr Check | GTGGCGTGATGCATTCCGTCTC | 114 |
| Low | | |
| MdtG N20 Up | ATGCTATTACGCTCTGCCCTGTTTTAGAGCTAGAAATAGCA | 115 |
| | AG | |
| MdtG N20 | AGGGCAGAGCGTAATAGCATACTAGTATTATACCTAGGACT | 116 |
| Low | GAG | |
| MdtG ssDNA | GAT ATT TTG TGC CAG CCC CAT CAA CAC CAT | 117 |
| Repair | CAC GAT GCC CAT TTA TTA TTA ATT GAG GGC | |
| | AGA GCG TAA TAG CAT GAG TTT TCG GCC TTT | |
| | ACG GTC GGC GAG TCC ACC CCA AAA CGG | |
| MdtG Check | GGCATTGAACTGTTGCACATTCGC | 118 |
| Up | | |
| MdtG Check | CATGATGGCACCAGAGCAGTATATG | 119 |
| Low | | |
| MdtH N20 Up | GAGAGCAATACCGACCATGAGTTTTAGAGCTAGAAATAGCA | 120 |
| | AG | |
| MdtH N20 | TCATGGTCGGTATTGCTCTCACTAGTATTATACCTAGGACT | 121 |
| Low | GAG | |
| MdtH ssDNA | GAA AAT ACC CAG ACC TTG CTG AAT AAA TTG | 122 |
| Repair | GCG TAG ACC GAG AGC AAT ACC GAC CAT GAC | |
| | TTA TTA TTA ATT GGC CCA GCC CAT TTG ATC | |
| | AAC GAA GCG GAT AGA | |
| MdtH Check | GCGTCGTCGTTGAGCAGAACATG | 123 |
| Up | | |
| MdtH Check | GTCGGTCTGTGGTTAAGCGCAC | 124 |
| Low | | |
| YieO N20 Up | CATCAGTTATACGCTGACGGGTTTTAGAGCTAGAAATAGCA | 125 |
| | AG | |
| YieO N20 | CCGTCAGCGTATAACTGATGACTAGTATTATACCTAGGACT | 126 |
| Low | GAG | |
| YieO ssDNA | GCG ATC GGC TAG CCA TCC GCT TAC CGG AAT | 127 |
| Repair | AAG CAT TTA TTA TTA ATT CAC CGT CAG CGT | |
| | ATA ACT GAT GAT GGC TGA TTG CAT CGC GAG | |
| | AGG AGA ACG ATT AAG | |
| YieO Check | CGTCAATTACCAGCGACACAGTG | 128 |
| Up | | |
| YieO Check | CGTGCATGGAGAATATAGAGAAGC | 129 |
| Internal | | |
| MdIB N20 Up | ATCAGGACCGCAATCCCCAGGTTTTAGAGCTAGAAATAGCA | 130 |
| | AG | |
| MdIB N20 | CTGGGGATTGCGGTCCTGATACTAGTATTATACCTAGGACT | 131 |
| Low | GAG | |
| MdIB ssDNA | ACT GAC TTC TGC CGC CGC CGC AAC CCA CAT | 132 |
| Repair | CAT CAG GAC CGC AAT CCC CAG TTA TTA TTA | |
| | ATT TTT ACG CCA CGG CGA ACC GTA CGC TAA | |
| | CAG GCG CTT GAG AGT | |
| MdIB Check | CTTGATGATGCGCTTTCGGCGGTG | 133 |
| Up | | |
| MdIB Check | CGCCATATAGTGTGAACGACTGGCC | 134 |
| Internal | | |
| MdtO N20 Up | TTCATGAAGAGTTAAGCGAGGTTTTAGAGCTAGAAATAGCA | 135 |
| | AG | |
| MdtO N20 | CTCGCTTAACTCTTCATGAAACTAGTATTATACCTAGGACT | 136 |
| Low | GAG | |
| MdtO | GAG TTG CAC GGT CTG CGG CAC GCG ACC TGG | 137 |
| SSDNA | TCG TTA TTA TTA ATT CTC GCT TAA CTC TTC | |
| Repair | ATG AAA GAA CGC CAG CAG CCT GAC CAC CGG | |
| | TAA TGG CAG GGA GTT | |
| MdtO Check | CGTAGCGCATATAGTCTGGATTGG | 138 |
| Internal | | |
| MdtO Check | GAGGGTAAAGTGGATTCGATTGGC | 139 |
| Up | | |
| YojH N20 Up | TGAATGGTCGATGACCATGGGTTTTAGAGCTAGAAATAGCA | 140 |
| | AG | |
| YojH N20 | CCATGGTCATCGACCATTCAACTAGTATTATACCTAGGACT | 141 |
| Low | GAG | |
| YojH ssDNA | GCC GTT CGA ACT CTC CTG CGC GAC ACC CTC | 142 |
| Repair | CAG GCG TTA TTA TTA ATT CAC CAT GGT CAT | |
| | CGA CCA TTC AGG CTC CAG CTC GCG TAA ATA | |
| | GGT CCC CAA CGT | |
| YojH Check | CACTGACGACTTCAGTACCCAGACG | 143 |
| Internal | | |
| YojH Check | CTTAAGTGTTACCGTTGATGCCGC | 144 |
| Up | | |
| YojI N20 Up | AACTTCTTGTACTTGTCTGGGTTTTAGAGCTAGAAATAGCA | 145 |
| | AG | |
| YojI N20 Low | GCCAGACAAGTACAAGAAGTTACTAGTATTATACCTAGGAC | 146 |
| | TGAG | |
| YojI ssDNA | TAG CGC CAT CAC ACT GAT AAA TGG CCA GCG | 147 |
| Repair | ATA CTG TTA TTA TTA ATT CCA GAC AAG TAC | |
| | AAG AAG TTC CAT GCA GAA AAC CCG GAC AAT | |
| | GAA TTA CAG CCC GCA GTT | |
| YojI Check | GTCGCGGCAACGTTGGTATCAG | 148 |
| Internal | | |
| YojI Check | GCTGCATCAGGATAAAGACGAACCG | 149 |
| Up | | |
| YajR N20 Up | GGTGAGAGGCGCGCGACCTGGTTTTAGAGCTAGAAATAGCA | 150 |
| | AG | |
| YajR N20 | CAGGTCGCGCGCCTCTCACCACTAGTATTATACCTAGGACT | 151 |
| Low | GAG | |
| YajR ssDNA | GCC CAG CAT GCG CAA CGA GAA TAC GGT CCC | 152 |
| Repair | TTA TTA TTA ATT CCA GGT CGC GCG CCT CTC | |
| | ACC TGG CGT CAT TTT ATA ATC GTT cat TAC | |
| | CAC CTC TGT TTT AAA TTC | |
| YajR Check | GTTGCTGATGACAGAATCTGGGCGC | 153 |
| Up | | |
| YajR Check | CCATTCCGGACTCACGATTAAGTACG | 154 |
| Internal | | |
| YdhC N20 Up | TTGCAGGTCGGCCTGTATGGGTTTTAGAGCTAGAAATAGCA | 155 |
| | AG | |
| YdhC N20 | CCATACAGGCCGACCTGCAAACTAGTATTATACCTAGGACT | 156 |
| Low | GAG | |
| YdhC | AAG GAA CAG ACT AAG GCT GGC ACT GAC AGC | 157 |
| SSDNA | AGA | |
| Repair | CGC AGG CGT TTG CAG GTC GGC CTG TAT GGC | |
| | TTA TTA TTA ATT GAA AGC AGG CAG ATA CAT | |
| | ATC GGT TGC CAG AAA | |
| YdhC Check | CACATCACGGTGCCGTCGTTCAAAG | 158 |
| Up | | |
| YdhC Check | CCGGTTTACGACCATAACGGTCGG | 159 |
| Internal | | |
| CusA N20 Up | ATAGATCCAGCCAACACCCGGTTTTAGAGCTAGAAATAGCA | 160 |
| | AG | |
| CusA N20 | CGGGTGTTGGCTGGATCTATACTAGTATTATACCTAGGACT | 161 |
| Low | GAG | |
| CusA ssDNA | CAG ATC GTG CTT ACC GCT GCG ATC CAC CAG | 162 |
| Repair | TGC ATA TTC ATA GAT CCA GCC AAC ACC CGT | |
| | TTA TTA TTA ATT ATC TGG CCC CAG CTC GGC | |
| | GCT GAC TCC | |
| CusA 200 Up | GGTGATTACCGTTGATGCCGAC | 163 |
| CusA Check | GAGAAACCAGTCCTGTAATGAGCG | 164 |
| Internal | | |
| fhuA 40 Up | TGTCACATGGAGTTGGCAGG | 165 |
| glmS 3680 | CTTACCATGTCGCGCTGATC | 166 |
| Low | | |
| pstS 520 Up | CAGGTAGCTGGTGAAGACGAAG | 167 |
| F1B | CAGGCGCTTTTCGTAATTCATC | 168 |
| F4B | CCCACCATTCAGAGAAGAAACC | 169 |
| F1C | CCATCAAAAAACCAGGCTTGAG | 170 |
| F4C | GCATTCTGTAACAAAGCGGGAC | 171 |
| pLac-Fwd | GCTCAACGGCCTCAACCTAC | 172 |
| pINT-Rev | CCAACTCAGCTTCCTTTCGG | 173 |
| PolB-Fwd | CAGTTCGAAATCAAGCGAGGAG | 174 |
| AcrB Ndel | GGAATTCCATATGAACAAAAACAGAGGGTTTACG | 175 |
| Up | | |
| AcrB XhoI | CCGCTCGAGTCAATGATGATCGACAGTATG | 176 |
| Low | | |
| AcrBD408A | CCTGTTGGTGGATGCCGCCATCGTTGT- | 177 |
| Fwd | | |
| AcrBD408A | CCACAACGATGGCGGCATCCACCAACAGG | 178 |
| Rev | | |
| AcrD Ndel | GCTCATATGGCGAATTTCTTTATTGATCG | 179 |
| Up | | |
| AcrD XhoI | TATCTCGAGTTATTCCGGGCGCGGCTTCA | 180 |
| Low | | |
| AcrE Ndel | GGAATTCCATATGACGAAACATGCCAGGTTTTTCC | 181 |
| Up | | |
| AcrF XhoI | CCGCTCGAGTTATCCTTTAAAGCAACGGCG | 182 |
| Low | | |
| EmrA Ndel | GGAATTCCATATGAGCGCAAATGCGGAGAC | 183 |
| Up | | |
| EmrB XhoI | CCGCTCGAGTTAGTGCGCACCGCCTC | 184 |
| Low | | |
| EmrK NdeI | GGAATTCCATATGGAACAGATTAATTCAAATAAAAAACATT | 185 |
| Up | C | |
| EmrY BamHI | CCGGGATCCTCACCCAACGCCTTTCGCT | 186 |
| Low | | |
| MdtE Ndel | GACCATATGAACAGAAGAAGAAAGCT | 187 |
| Up | | |
| MdtF XhoI | ATACTCGAGTTACGCTTTTTTAAAGCGG | 188 |
| Low | | |
| MdtB Ndel | GTCCATATGCAGGTGTTACCCCCGAGCAGC | 189 |
| Up | | |
| MdtC XhoI | GTTCTCGAGTTACTCGGTTACCGTTTGTTTAG | 190 |
| Low | | |
| MacA Ndel | GGAATTCCATATGAAAAAGCGGAAAACCG | 191 |
| Up | | |
| MacB XhoI | CCGCTCGAGTTACTCTCGTGCCAGAGC | 192 |
| Low | | |
| EmrE Ndel | GTACCATATGAACCCTTATATTTATC | 193 |
| Up | | |
| EmrE XhoI | GTACCTCGAGTTAATGTGGTGTGCTTCG | 194 |
| Low | | |
| MdtK Ndel | GTCCATATGGTGCAGAAGTATATCAGTGAAG | 195 |
| Up | | |
| MdtK XhoI | GTCCTCGAGTTAGCGGGATGCTCGTTGCAG | 196 |
| Low | | |
| MexC Ndel | GGAATTCCATATGGCTGATTTGCGTGCAATA | 197 |
| Up | | |
| MexD HindIII | CTATAAGCTTTCACTCCCCGGCCGAA | 198 |
| Low | | |

### Whole Genome Sequencing of EKO-35 and EKO-35-Pore

[0164] Genomic DNA was extracted using the One-4-All Genomic DNA Miniprep Kit (BioBasic), according to the manufacturer's guidelines. Quality of the extracted gDNA was assessed using gel electrophoresis. Illumina DNA library preparation was performed using an Illumina Nextera kit by the Microbial Genome Sequencing Center (Pennsylvania, USA), which was followed by Illumina sequencing on a NextSeq 2000 platform. Analysis of the raw reads was performed using Geneious Prime 2021.0.2 (Kearse, M. et al., 2012). Low quality reads were trimmed using an in-suite BBDuk plug-in. Raw wild-type reads were assembled to an NCBI reference genome (Accession No. CP009273.1) with bowtie2. The resulting assembly was used as a reference to assemble the EKO-35 mutant reads. Differences between the wild-type BW25113 and EKO-35 strains were identified by searching for single nucleotide polymorphisms (SNPs) and deletions using the following thresholds: minimum variant frequency of 0.75, maximum variant P-value of 10⁻⁶, and minimum variant P-value of 10⁻⁵. 11 mutations were identified, including a mutation in hdfR (T806C, L269P). CRISPR-Cas9-mediated counter selection was utilized to repair the mutation in hdfR, which introduced two intentional silent mutations (hdfR C722G and A838G) to remove the adjacent PAM site and AseI-guided screening purposes as described above. For the EKO-35-Pore strain, genomic DNA extraction, sequencing, analysis, genome assembly, and mutation identification was performed as described above. Whole genome sequencing was deposited in the GenBank database (BioProject ID PRJNA838981).

Construction of the pINT2 Efflux Gene Library

[0165] Inventors first attempted to generate marker less integrations of efflux-encoding genes into araC using the pINT1 plasmid (Cox, G. et al., 2022), under the constitutive control of the strong PBIa promoter. However, inventors observed numerous deleterious mutations following ligation into this vector and genomic integration, indicating high expression levels were not feasible. Consequently, the pINT2 plasmid was selected for the expression of efflux pump encoding genes from the same constitutive PLacI promoter. This plasmid enables single-copy genomic integration of a selected gene through integration into the nonessential araC gene within the arabinose operon (Cox, G. et al., 2022). All E. coli genes were amplified from E. coli BW25113 genomic DNA, and mexCD was amplified from P. aeruginosa PAO1, using a high-fidelity polymerase, followed by ligation into pINT2. Successful clones were verified using PCR (Primers: pLac-Fwd/pINT-Rev, Table 4) and confirmed via Sanger sequencing at The Centre for Applied Genomics (TCAG) (The Hospital for Sick Children) and the AAC (University of Guelph). For the interplay studies, this process was repeated using the pGDP2 plasmid (Cox, G. et al., 2022).

### Construction of the Efflux Platform

[0166] For genomic integration, genes of interest and the adjacent kanamycin resistance cassette were amplified from pINT2 using a high-fidelity polymerase and the F1B-Fwd/F4B-Rev or F1C-Fwd/F4C-Rev primers (Table 4). For the integration of efflux pump-encoding genes, electrocompetent EKO-35 cells were transformed with ng of pKD46. Electrocompetent recombinase-induced cells were transformed with 500 ng of each amplicon (BioRad MicroPulser, Ec1 setting, 1 mm electroporation cuvette (Fisher). Genomic integrations were verified via PCR (Primers: PolB-Fwd/pINT-Rev, Table 4). Successful integrations were transformed with pCP20 to remove the kanamycin resistance cassette. Prior to phenotypic profiling, all integrated genes, including their promoters, were verified using Sanger sequencing (TCAG, The Hospital for Sick Children).

[0167] For genomic integration of the pore, the fhuA ΔC/Δ4L gene and the adjacent gentamicin resistance cassette were amplified using a high-fidelity polymerase and the fhuA_40_Up/gImS_3680_Low primers (Table 4). Integration of the pore gene was performed as described above. The pore gene was introduced into the intergenic region between the glmS and pstS genes, with gene expression under the control of a constitutive promoter (Kearse, M. et al., 2012). Genomic integrations were verified using PCR (Primers: pstS_520_Up/glmS_3680_Low, Table 4). Successful integrations were transformed with pCP20 to remove the gentamicin resistance cassette as previously described. Activity of the pore was confirmed through susceptibility testing with the large antibiotic vancomycin prior to phenotypic profiling and further susceptibility testing.

### Assessing the Utility of the EKO-35 Efflux Platform

[0168] To enable comparison between efflux production in different genetic backgrounds, each efflux pump-encoding gene was also integrated into the genome of the wild-type BW25113 strain, the single gene deletion mutant from the Keio Collection, and EKO-35. Strains of interest were propagated on LB agar at 37° C. Cell inoculum was prepared using the colony resuspension method and applied to a 96-well well plate (VWR) in technical duplicate, and the minimum inhibitory concentrations were determined according to Clinical & Laboratory Standards Institute (CLSI) protocols in MHB II (Patel J. B. et al, 2015). The plates were incubated for 18 h (Multitron Shaker, Infors HT) at 37° C. with aeration at 900 rpm. The plates were equilibrated to room temperature before the OD600 nm was measured using a BioTek Synergy H1 microplate reader. For interplay profiling, blank subtracted OD600 nm values >0.1 were considered to represent growth.

### Phenotypic Profiling of EKO-35

[0169] For growth profiling in nutrient-rich conditions, strains were propagated on LB agar for 18 h at 37° C. Single colonies were inoculated into LB and grown at 37° C. until the mid-exponential phase (OD600 nm˜0.6) was reached. All strains were assessed with at least three biological replicates. The cultures were standardized to an OD600 nm˜0.1 in sterile 0.85% saline (w/v). Standardized cultures were diluted 1/200 into LB and 100 μL of the resulting dilution were applied to round-bottom 96-well microtiter plates (VWR). To prevent evaporation, the microtiter plates were sealed (labeling tape, Fisher Scientific). The OD600 nm was measured every 15 minutes over the course of 24 h using a BioTek Synergy H1 microplate reader. Growth was assessed at both 37° C. and 25° C.

[0170] For growth profiling in nutrient-limited conditions, strains were propagated in biological triplicate on LB agar at 37° C. Multiple single colonies were suspended, using three separately prepared inoculums per strain, in sterile 0.85% saline (w/v) to an OD600 nm˜0.1. Standardized cultures were diluted 1/200 in fresh M9 and 100 μL of the resulting dilution was applied to round-bottom 96-well microtiter plates (VWR). The plate was sealed (labeling tape, Fisher Scientific) to prevent evaporation. Growth was assessed as described above, at both 37° C. and 25° C., for 48 h.

[0171] For physiological profiling in low-oxygen conditions, strains were prepared in LB or M9 as described above. To a round-bottom 96-well microtiter plate (VWR, tissue culture treated), 100 μL of the diluted cultures were applied in triplicate. Prior to incubation, the sample plate was placed into an anaerobic jar (Oxoid™ AnaeroJar, Thermo Fisher Scientific) with an anaerobic gas generator (AnaeroPack™ Thermo Fisher Scientific) for 30 min. The plates were incubated in a BioTek Synergy H1 plate reader, equipped with an 02 gas controller. Using nitrogen gas, the oxygen levels in the plate reader were maintained at 1% (LB) and 5% (M9). Growth was assessed as described above.

[0172] To assess fitness of EKO-35 expressing wild-type copies of the genes identified to harbor nonsynonymous mutations, Inventors obtained clones from the E. coli ASKA library (Kitagawa, M. et al., 2005) with the rspA, tufA, pitA, wcaC, gyrB, and yjfC genes carried on plasmids, with gene expression under the control of an IPTG-inducible promoter. The ASKA plasmids were verified using Sanger sequencing and gene expression was induced with 0.1 mM IPTG. In the wild-type E. coli K-12 strain, the plasmids were maintained with 25 μg/mL chloramphenicol. Due to the changes in susceptibility of the efflux-deficient strains, in EKO-35 the plasmids were maintained with 4 μg/mL and 1 μg/mL chloramphenicol in Lysogeny broth and M9 minimal glucose medium, respectively.

### Assessing Biofilm Formation

[0173] Overnight cultures were propagated in LB at 37° C. for 18 h. Saturated cultures were diluted 1/100 into LB or M9. To a flat-bottom 96-well microtiter plate (CoStar, untreated polystyrene), 150 uL of diluted culture was applied in triplicate. The plates were sealed to reduce evaporation and incubated statically at 37° C. for 24 h (nutrient-rich media) or 48 h (nutrient-limited media). To assess the effect of the nonsynonymous mutations on biofilm formation, this procedure was repeated with the addition of 0.1 mM IPTG for plasmid induction and chloramphenicol for plasmid maintenance at the concentrations specified above.

[0174] Following incubation, the optical density (OD600 nm) of the samples were measured using a BioTek Synergy H1 microplate reader. The cultures were aspirated, and the plates were washed in triplicate with 300 uL of deionized water using a BioTek ELx405 microtiter plate washer. Each well was stained with 175 uL of (w/v) crystal violet (CV), followed by static incubation at room temperature for 20 min. The CV was removed, and the plates were washed with deionized water until no excess stain was present. The plates were allowed to air dry before 175 uL of 0.7% acetic acid was applied to each well, followed by incubation at room temperature for min to solubilize the CV. The absorbance of each sample was measured at 595 nm using a BioTek Synergy H1 microplate reader.

### Susceptibility Profiling of the EKO-35 Platform to Determine Physicochemical Substrate Profiles

[0175] EKO-35 strains containing the chromosomally integrated genes of interest were propagated on LB agar at 37° C. for 18 h. Single colonies were used to inoculate 3 mL of LB followed by incubation at 37° C. for 18 h with aeration at 220 rpm. The bacterial cells were harvested by centrifugation and resuspended in phosphate buffered saline (PBS) ([pH 7.4], 137 mM NaCl (Bioshop), 2.7 mM KCl (Bioshop), 10 mM Na2PO4 (Bioshop) and 1.8 mM K2PO4) to an OD600 nm˜1.0, followed by 1/2000 dilution into MHB II.

[0176] To a 384-well microtiter plate (Corning, untreated polystyrene), 500 nL of compound was dispensed, in duplicate, and serially titrated 2-fold using an Echo 550 acoustic liquid dispenser (Labcyte Inc.). For compounds dissolved in DMSO, the concentration of DMSO did not exceed 1% of the final well volume. As a solvent control, 500 nL of DMSO was applied to wells that contained no compound. Using a multichannel pipette, 50 μL of the prepared bacterial inoculum was applied to each well. To enable background correction post-incubation, the OD600 nm was measured (Biotek Synergy Neo2 microplate reader) prior to incubation. The plates were incubated at 37° C. with aeration at 900 rpm for 18 h. The plates were equilibrated to room temperature and the OD600 nm measured using a BioTek Synergy Neo2 microplate reader. Data was analyzed in both Prism (GraphPad, Version 9.2.0) and Microsoft Excel (Version 16.53). Raw data were input into Microsoft Excel and the pre-incubation OD600 nm measurements were subtracted from the post-incubation OD600 nm measurements. These corrected measurements were input into Prism 9 as a grouped analysis. MIC values for each compound and the corresponding strain were normalized using Prism 9, where the highest MIC value per compound represented 100%. All other MIC values were adjusted accordingly and visualized using the single-color scale grouped heat map function. Identification of compound chemical properties was achieved using DataWarrior (Version 5.5.0). Using PubChem, the SMILES chemical notation for each compound was obtained and compiled in Microsoft Excel. The resulting spreadsheet was input into DataWarrior and properties were calculated from the compound chemical structures.

### Measuring PAβN and NMP Antibiotic Synergy Using the EKO-35 Efflux Platform

[0177] Synergy measurement using checkerboard analysis was performed in 96-well microtiter plates using the microdilution broth method, according to CLSI guidelines (Patel J. B., 2015). The cell inocula were prepared using the colony resuspension method. The minimum inhibitory concentrations (MICs) were defined as the lowest concentration that provided no growth, as determined by measurement of the OD₆₀₀ₙₘ using a Synergy H1 microplate reader (BioTek). Susceptibility testing was performed in MHB II with a final volume of 100 μL. PAI3N (Bachem Americas) was solubilized in MHB II. When assessing PAI3N synergy, linezolid, oxacillin, fusidic acid, and erythromycin were solubilized in 100% DMSO. Ciprofloxacin and novobiocin were solubilized in distilled water. NMP, linezolid, oxacillin, fusidic acid were solubilized in 50% DMSO (v/v), and erythromycin in 50% ethanol (v/v). Ethidium bromide and ciprofloxacin were solubilized in distilled water. Solvent controls were included in each plate.

[0178] The Fractional Inhibitory Concentration Index (FICI) was used to assess the synergy of PAI3N in combination with different antibiotics. The FICI represents the ΣFIC of each drug. The FICI for each drug was calculated using the following formula: FICI=FIC_{A}+FIC_{B}=(C_{A}/MIC_{A})+(C_{B}/MIC_{B}). Where MIC_{A} and MIC_{B} are the MICs of drugs A (PAI3N/NMP) and B (antibiotic) alone, and CA and CB are the MICs of the drugs in combination. The effects of PAβN or NMP in combination with antibiotics were classified as: synergistic (FICI<0.5), additive (FICI>0.5-1.0), indifferent (FICI>1.0-2.0), and antagonistic (FICI>2.0). Fold increases in resistance provided by efflux pumps were calculated by dividing the MIC values of strains expressing efflux pumps by the MIC value of EKO-35.

### AcrB Western Blot Analysis

[0179] Overnight cultures of EKO-35, EKO-35 araC::acrB, and EKO-35 araC::acrBD408A were subcultured (1:100) into 200 mL LB and incubated at 37° C. with 220 rpm shaking until an optical density (OD600 nm) of 0.6 was reached. The cells were harvested by centrifugation (5,000×g) and resuspended in 100 mM Tris HCl [pH 7.0] with 150 mM NaCl. The cells were lysed by sonication and the sonicate was cleared at 4,000×g for 10 min, followed by removal of occlusion bodies at 20,000×g for 20 min. Crude membranes were isolated by ultracentrifugation at 100,000×g for 1 h. Membrane fractions were resuspended in 100 mM Tris HCl [pH 7.0] with 150 mM NaCl and 2% sodium dodecyl sulphate (SDS). Fractions were quantified using a BCA assay (Thermo Fisher). 10 μg of each sample was resolved by SDS-PAGE and transferred to Amersham™ Protran™ 0.45 μM nitrocellulose membrane (GE) for Western blot analysis using a polyclonal rabbit anti-AcrB (Hazel, A. J. et al., 2019) and an anti-Rabbit IgG(H+L) horseradish peroxidase (HRP) conjugated secondary antibody (Invitrogen). Visualization was performed using the Luminata Crescendo Western chemiluminescent HRP substrate (Millipore) and a Bio-Rad ChemiDocXRS+ system. Total protein normalization was achieved using Bio-Rad stain-free gel imaging and ImageLab (version 6.1).

### Sample Preparation for Proteomic Analysis

[0180] Saturated LB overnight cultures of the wild-type and EKO-35 strains were inoculated (1/100 dilution) into 50 mL of LB until the mid-exponential phase of growth was reached (OD600 nm=0.5). 3×10 9 cells were harvested by centrifugation (4000×g), washed twice in phosphate-buffered saline (PBS), and the cell pellet was flash frozen in liquid nitrogen. Whole-cell proteome samples were generated using a modified total proteome extraction protocol (Rappsilber, J. et al., 2007). The cell pellets were stored at −80° C. until the experiment was performed. Briefly, the cell pellet was resuspended in ice cold 100 mM Tris-HCl [pH 8.5]. The cells were lysed using a probe sonicator (three cycles of 30 sec on/off, 30% amplitude) and the samples were treated with 2% SDS and 10 mM dithiothreitol (DTT). To enrich membrane proteins, bacterial membranes were isolated as escribed above. To minimize contamination with cytoplasmic proteins, the membrane pellet was washed in ice cold 100 mM Tris-HCl [pH 8.5], followed by ultracentrifugation. The membrane pellet was resuspended in 100 mM Tris-HCl [pH 8.5] with 2% SDS and 10 mM dithiothreitol (DTT). Both the whole-cell and membrane samples were heated to 95° C. prior to treatment with 55 mM iodoacetamide (IAA). The samples were then incubated with 100% acetone overnight at −20° C. Precipitated protein from both the whole-cell and membrane fractions were combined by centrifugation at 10,000×g at 4° C. and washed twice with 80% acetone. The protein pellets were then solubilized in 40 mM HEPES [pH 5.0] with 8 M urea and quantified using a bovine serum albumin (BSA) tryptophan assay. The samples were digested overnight at room temperature with LysC and trypsin proteases (Promega, protein/enzyme ratio 50:1). 10% v/v trifluoroacetic acid (TFA) was then added and 50 μm acidified peptides were purified and desalted using a STop And Go Extraction (STAGE) tip with 3 layers of C18 resin using the described protocol (Rappsilber, J. et al., 2007).

### Mass Spectrometry and Bioinformatic Analysis

[0181] Dried peptides were suspended in Buffer A (2% (v/v) acetonitrile, 0.1% (v/v) trifluoroacetic acid, 0.5% (v/v) acetic acid) and 25 ng of peptides were analyzed on a Q Exactive™ HF-X hybrid quadrupole-orbitrap mass spectrometer (ThermoFisher Scientific) coupled to an EasynLC™ 1200 High-Performance Liquid Chromatography (ThermoFisher Scientific). The samples were loaded onto an in-line 75 μm×50 cm PepMap RSLC EASY-Spray column filled with 2 μm C18 reverse-phase silica beads (ThermoFisher Scientific). Peptides were separated and directly electrosprayed into the mass spectrometer using a linear gradient from 3 to 20% Buffer B (80% (v/v) acetonitrile, 0.5% (v/v) acetic acid) over 18 min, from 20 to 35% Buffer B over 31 mins, followed by a steep 2 min ramp to 100% Buffer B for 9 min in 0.1% formic acid at a constant flow of 250 nL/min. The mass spectrometer was operated in data-dependent mode, switching automatically between one fill scan and subsequent MS/MS scans of 30 most abundant peaks, with full-scans (m/z 400-1600) acquired in the Orbitrap analyzer with a resolution of 60,000 at 400 m/z.

[0182] Raw mass spectrometry files were analyzed using MaxQuant (ver. 1.6.14.0 (Cox, J. & Mann, M., 2008). The spectra were searched using the Andromeda search engine with the E. coli K-12 proteome as reference (Accession No. P000000625, accessed June 2021 with 4391 sequences). A minimum of two distinct peptides were required for protein identification and the FDR was set to 1%. The ‘match between runs’ feature of MaxQuant was enabled. Quantification was performed by label-free quantification (LFQ) using the MaxLFQ algorithm (Cox, J. et al., 2014). The mass spectrometry proteomics data have been deposited to the ProteomeXchange Consortium via the PRIDE partner repository with the dataset identifier PXD033975. All mass spectrometry experiments were performed in biological quadruplicate.

[0183] In nutrient-rich conditions, a total of 1,979 proteins were identified from whole cell extracts of the wild-type strain, which represented 45% of the predicted proteome. Principal component analysis (PCA) separated EKO-35 from the wild-type strain (Component 1, 40.6%), with slight variation observed between the biological replicates (Component 2, 17.2%) (FIG. 1F). In nutrient-rich conditions, biological replicate reproducibility was 96.9% and 96.6% between wild-type and EKO-35 replicates, respectively. In nutrient-limited conditions, Inventors identified a total of 2,019 proteins from whole cell extracts of the wild-type strain, which represented 46% of the predicted proteome. PCA defined significant separation between EKO-35 and the wild-type strain (Component 1, 53.2%), and biological variation (Component 2, 14%) (FIG. 2F). In nutrient-limited conditions, biological replicate reproducibility was 94.8% and 96.6% between wild-type and EKO-35 replicates, respectively. Comparative analysis was performed with proteins identified in at least three biological replicates (1,880 proteins in nutrient-rich, and 1,819 proteins in nutrient-limited).

[0184] Statistical analysis and data visualization was performed using Perseus (version 1.6.2.2) (Cox, J. & Mann, M. 2012). Further analysis was only performed on proteins present in at least three out of four biological replicates within each strain. Upon filtering, missing values were imputed from a normal distribution. Significant changes in abundance of proteins between the two proteomes were defined with a false discovery rate (FDR)-correct Student's t-test (p-value 0.05) and Benjamini-Hochberg multiple hypothesis correction testing (FDR=0.05) was applied. 1D-annotation enrichment analysis of UniProt keywords enabled global assessment of changes in protein abundance (Tyanova, S. et al., 2016) using two-sample t-tests with P-value 0.05, FDR=0.05 and score <−0.5, <0.5. Data visualization was performed using GraphPad (version 8).

### Results

[0185] Generation of EKO-35: Inactivation of E. coli Drug Efflux Pumps

[0186] Inventors' first goal was to generate a simplified genetic background to overcome the challenges associated with the complexities of intact drug efflux networks. Using a combination of λ-Red recombineering and CRISPR Cas9-mediated counter selection. Inventors sequentially inactivated 36 genes encoding IM pumps from the genome of E. coli K-12 strain BW25113. Inventors started with an ΔacrB mutant from the Keio Collection, and then removed a further 12 pumps using the λ-Red system. One limitation of this approach is the possibility of unintended genomic deletions due to the introduction of adjacent Flp recognition target sites following the removal of numerous genes. Thus, the remaining genes were inactivated using CRISPR Cas9-mediated counter selection, and the introduction of three tandem stop codons into the beginning of each gene (Table 3).

[0187] The efflux genes were inactivated in the following order: ΔacrB; acrD; acrF; mdtF; macB; emrB; mdtL; mdtK; bcr; ydeA; mdtM; yddA; yebQ; emrE; mdtD; sugE; ynfM; emrD; ydeF; mdtJ; ydiM; mdtB, mdlA; emrY; mdfA; fsr; mdtG; mdtH; yieO; mdlB, mdtO, yojH, yojI, yajR, ydhC; cusA. While generating the strain, inventors identified a missense mutation (L269P) within the gene encoding the Hns-dependent flhDC regulator (HdfR), which inventors deduced was present in the acrB mutant used as the starting background of EKO-35. To ascertain whether the hdfR mutation occurred in response to loss of acrB, inventors removed acrB from the genome of the wild-type E. coli BW25113 strain using the λ-Red system. Sequencing of the hdfR gene revealed the mutation was not present (data not shown). Since HdfR is a transcriptional regulator of important physiological processes, and the mutation did not appear to be induced by loss of acrB, inventors repaired this mutation using CRISPR Cas9-mediated counter selection.

[0188] Since many of the efflux pump-encoding genes have predicted start codons and are poorly characterized, it is possible that alternative start codons located downstream from the inserted tandem stop codons (Table 3) could be utilized for a subset of the CRISPR-inactivated pumps. To investigate, inventors profiled the genome of the efflux-deficient strain, which included the inserted stop codons, using the Prodigal prokaryotic gene recognition and translation initiation site identifier. Overall, the program did not predict production of any potentially functional efflux pumps, which supports the notion that the tandem stop codons were sufficient to prematurely terminate translation, and that alternate start codons would not be utilized (Tables 26A and 26B). Indeed, Prodigal analysis of the wild-type strain's genome predicted production of all pumps (Tables 26A and 26B).

[0189] In addition, inventors also took advantage of new developments in protein structure predictions, and carefully analyzed AlphaFold-generated models of each efflux pump to ascertain whether the predicted start codons were correct based on the structural features of the proteins. Such an analysis indicated the inserted stop codons were sufficient to inactivate the different genes; however, the modeled structure of a predicted ABC efflux pump (YojH) indicated that the yojH gene does not encode an efflux pump. While yojH is located adjacent to another ABC efflux pump, YojI, which does structurally resemble an ABC transporter, the predicted YojH structure lacks the structural features of an ABC-type efflux pump, including transmembrane helices. Investigating further, inventors observed that YojH is described as malate:quinone oxidoreductase, a membrane-associated enzyme involved in the citric acid cycle/glyoxylate cycle. However, the function of this protein in E. coli is poorly described and the enzyme has not been shown to catalyze oxidation of malate in E. coli. Since the gene does not encode an efflux pump, inventors repaired the inactivated yojH gene by removing the inserted stop codons using CRISPR Cas9-mediated counter selection. This strain was subsequently designated Efflux KnockOut-35 (EKO-35), and was used for phenotypic characterization and construction of an efflux platform, as described below. The EKO-35 genome sequence confirmed successful disruption of the 35 efflux-encoding genes, including successful repair of hdfR and yojH, and also revealed ten additional secondary mutations (FIG. 6), six of which encoded missense mutations and four silent substitutions. Inventors mapped the occurrence of these missense mutations to the disruption of specific genes (Table 5 and Table 6).

### Characterizing EKO-35: Phenotypic Analysis

[0190] With the intent of using EKO-35 as a simplified genetic background to study the functions of drug efflux pumps, inventors' second goal was to fully characterize EKO-35 prior to further investigations. Other efflux-deficient backgrounds (e.g., tolC mutants) display pleiotropic phenotypes, including severe growth defects in minimal M9 medium with glucose supplied as the carbon source. Indeed, tolC inactivation causes periplasmic accumulation of enterobactin in this low-iron growth medium, which underlies this conditionally essential phenotype. In addition, tolC mutants exhibit membrane stress and depletion of essential metabolites, resulting in ‘metabolic shutdown’ in minimal glucose medium. Thus, inventors were curious to ascertain whether loss of 35 IM efflux pumps also affected the fitness of E. coli.

[0191] First, inventors generated a control strain that was used as a comparator during phenotypic profiling of EKO-35. RND efflux pumps, such as AcrB, are trimeric complexes spanning the IM up to 36 times. It has been suggested that caution should be taken when interpreting phenotypes of gene deletion mutants since such phenotypes could be due to loss of integral membrane proteins, rather than loss of efflux function. Based on previous studies, inventors introduced a D₄₀₈A substitution into AcrB to enable the production of an efflux inactive variant in EKO-35. Using the pINT2 plasmid, the mutated acrB gene was integrated into the arabinose operon of EKO-35 (EKO-35 araC::acrB_{D408A}), with gene expression under the control of the constitutive P_{LacI} promoter. Inventors confirmed the AcrB_{D408A} protein was inactive and present at comparable levels to the wild-type protein within the membrane of EKO-35 (FIGS. 1A and 7).

[0192] Next, while the successful generation of EKO-35 showed the E. coli drug efflux system is dispensable for growth, inventors measured the growth kinetics and assessed the cellular morphology of EKO-35 under commonly used laboratory conditions: nutrient-rich (Lysogeny broth) and nutrient-limited (M9 defined minimal medium with glucose) medium at 37° C. (FIGS. 1B and 2A, Table 1). Compared to the wild-type strain, EKO-35 exhibited a 1 h extended lag phase in the nutrient-rich medium (FIG. 1B and Table 1), and phenotypic analysis revealed no significant changes in morphology (FIGS. 1C and 1E). Under nutrient-limitation at 37° C., EKO-35 entered the exponential stage of growth ˜5 h later than the parental strain, and exhibited longer cell length (FIG. 2B and Table 1). As a comparison, inventors also profiled a ΔtolC mutant from the Keio Collection, which revealed there were distinct differences between the strains under nutrient-limited conditions (FIGS. 1B and 2A). As mentioned above, loss of TolC results in severe growth defects in nutrient-limited conditions due to compounding pleiotropic effects, including the accumulation of enterobactin due to iron limitation. However, inventors reveal deletion of all IM efflux pumps, including those that form complexes with TolC, does not elicit the same fitness cost (FIG. 2A). Inventors also measured the growth kinetics of EKO-35 in a defined MOPS medium, which included supplemental iron, revealing that the ˜5 h delay in the EKO-35 lag phase was not restored (FIG. 2E).

[0193] Next, to explore whether the nonsynonymous EKO-35 mutations (Table 5 and Table 6) were compensatory, and to ascertain if they impacted any of the observed phenotypes detailed in this disclosure, inventors obtained clones from the E. coli ASKA library harboring the rspA, tufA, pitA, wcaC, gyrB, and yjfC genes on plasmids with gene expression under the control of an IPTG-inducible promoter. Growth profiling revealed pitA overexpression conferred a lethal phenotype, and the overexpression of the remaining genes induced a fitness cost in EKO-35 under nutrient-rich optimal growth conditions, indicating that the mutations could be compensatory in nature (FIG. 8A (right)). A lethal phenotype was also observed for pitA in the wild-type strain, and tufA and rspA also decreased fitness (FIGS. 8A (right), 8C (right), and 8D (right)). Under nutrient-limited conditions, pitA and rspA overexpression induced a lethal phenotype and wcaC reduced the fitness of both strains (FIGS. 8E (left), 8A (left), and 8D (left)). Finally, gyrB and yjfC marginally increased the fitness of both strains in nutrient-limited conditions (FIG. 8F (left), FIG. 8B (left)). Overall, findings of this disclosure show the nonsynonymous mutations could alleviate fitness costs induced by loss-of-efflux in EKO-35.

### Characterizing EKO-35: Phenotypic Analysis

[0194] With the intent of using EKO-35 as a simplified genetic background to study the functions of drug efflux pumps, inventors' second goal was to fully characterize EKO-35 prior to further investigations. Other efflux-deficient backgrounds (e.g., tolC mutants) display pleiotropic phenotypes, including severe growth defects in minimal M9 medium with glucose supplied as the carbon source. Indeed, tolC inactivation causes periplasmic accumulation of enterobactin in this low-iron growth medium, which underlies this conditionally essential phenotype. In addition, tolC mutants exhibit membrane stress and depletion of essential metabolites, resulting in ‘metabolic shutdown’ in minimal glucose medium. Thus, inventors were curious to ascertain whether loss of 35 IM efflux pumps also affected the fitness of E. coli.

[0195] First, inventors generated a control strain that was used as a comparator during phenotypic profiling of EKO-35. RND efflux pumps, such as AcrB, are trimeric complexes spanning the IM up to 36 times. It has been suggested that caution should be taken when interpreting phenotypes of gene deletion mutants since such phenotypes could be due to loss of integral membrane proteins, rather than loss of efflux function. Based on previous studies, inventors introduced a D₄₀₈A substitution into AcrB to enable the production of an efflux inactive variant in EKO-35. Using the pINT2 plasmid, the mutated acrB gene was integrated into the arabinose operon of EKO-35 (EKO-35 araC::acrB_{D408A}), with gene expression under the control of the constitutive P_{LacI} promoter. Inventors confirmed the AcrB_{D408A} protein was inactive and present at comparable levels to the wild-type protein within the membrane of EKO-35 (FIGS. 1A and 7).

[0196] Next, while the successful generation of EKO-35 shows the E. coli drug efflux system is dispensable for growth, inventors measured the growth kinetics and assessed the cellular morphology of EKO-35 under commonly used laboratory conditions: nutrient-rich (Lysogeny broth) and nutrient-limited (M9 defined minimal medium with glucose) medium at 37° C. (FIGS. 1B and 2A, Table 1). Compared to the wild-type strain, EKO-35 exhibited a 1 h extended lag phase in the nutrient-rich medium (FIG. 1B and Table 1), and phenotypic analysis revealed no significant changes in morphology (FIG. 1C). Under nutrient-limitation at 37° C., EKO-35 entered the exponential stage of growth ˜5 h later than the parental strain, and exhibited longer cell length (FIG. 2B and Table 1). As a comparison, inventors also profiled a ΔtolC mutant from the Keio Collection, which revealed there were distinct differences between the strains under nutrient-limited conditions (FIGS. 1B and 2A). As mentioned above, loss of TolC results in severe growth defects in nutrient-limited conditions due to compounding pleiotropic effects, including the accumulation of enterobactin due to iron limitation. However, inventors reveal deletion of all IM efflux pumps, including those that form complexes with TolC, does not elicit the same fitness cost (FIG. 2A). Inventors also measured the growth kinetics of EKO-35 in a defined MOPS medium, which included supplemental iron, revealing that the ˜5 h delay in the EKO-35 lag phase was not restored (FIG. 2E).

[0197] Next, to explore whether the nonsynonymous EKO-35 mutations (Table and Table 6) were compensatory, and to ascertain if they impacted any of the observed phenotypes detailed in this disclosure, inventors obtained clones from the E. coli ASKA library harboring the rspA, tufA, pitA, wcaC, gyrB, and yjfC genes on plasmids with gene expression under the control of an IPTG-inducible promoter. Growth profiling revealed pitA overexpression conferred a lethal phenotype, and the overexpression of the remaining genes induced a fitness cost in EKO-35 under nutrient-rich optimal growth conditions, indicating the mutations could be compensatory in nature (FIG. 8A (left)). A lethal phenotype was also observed for pitA in the wild-type strain, and tufA and rspA also decreased fitness (FIGS. 8A (left), 8C (left), and 8E (left)). Under nutrient-limited conditions, pitA and rspA overexpression induced a lethal phenotype and wcaC reduced the fitness of both strains (FIGS. 8A (right), 8D (right), 8E (right)). Finally, gyrB and yjfC marginally increased the fitness of both strains in nutrient-limited conditions (FIGS. 8F (right) and 8B (right)). Overall, findings from this disclosure show that the nonsynonymous mutations could alleviate fitness costs induced by loss-of-efflux in EKO-35.

### Characterizing EKO-35: Quantitative Proteomic Profiling

[0198] To further characterize EKO-35, and to gain fundamental insight into how E. coli responds to loss-of-efflux, inventors assessed fluctuations in the membrane-enriched cellular proteome of cells sampled at the mid-exponential phase of growth (FIGS. 1F and 2D). In nutrient-rich conditions, a total of 1,979 proteins were identified from whole cell extracts of the wild-type strain, which represented 45% of the predicted proteome. Principal component analysis (PCA) separated EKO-35 from the wild-type strain (Component 1, 40.6%), with slight variation observed between the biological replicates (Component 2, 17.2%) (FIG. 1F).

[0199] Comparative proteomics showed significant changes in the abundance of 111 proteins in response to loss of the E. coli efflux system: 38 proteins were significantly increased in the wild-type proteome, and 73 proteins were significantly increased in the proteome of EKO-35 (FIG. 1G). The most significant differences in protein abundance were identified for two distantly related Fus homologs, YddB and PqqL (Table 7), which were >7-fold more abundant in EKO-35. YddB is an OM protein with structural homology to the OM ferredoxin transporter FusA. PqqL is a periplasmic metalloprotease analogous to the ferrodoxin processing protease FusC. Along with YddA, these proteins are proposed to function as a poorly characterized iron-uptake system. YddA is a member of the ABC efflux pump superfamily, which was disrupted during the generation of EKO-35. YddA phylogenetically clusters with other putative drug efflux pumps—YojI, MdlA, and MdlB. Other proteins highly abundant in EKO-35 included components of the flagellar apparatus (FliC), chemotaxis-associated proteins (Tsr), periplasmic chaperones (Spy), and metabolism-associated proteins, SrlA and SrlB (Table 7). In the wild-type strain, the most differentially abundant proteins (>3-fold) included components of the ferric citrate transport system⁴⁰ (FecA, FecB, and FecE), heat-shock molecular chaperone proteins (IbpA, IbpB), and the peptidase component of the HslVU protease (HslV) (Table 7).

[0200] Using a false discovery rate (FDR) of 2%, annotation enrichment 42 of the EKO-35 cellular proteome revealed few differences compared to the wild-type proteome. Increasing the FDR to 5% identified three categories enriched in the wild-type strain, including iron transport. These categories correlated to the reduced abundance of proteins with annotated functions associated with iron-transport in EKO-Drug efflux pumps are well-characterized for their role in siderophore extrusion. Therefore, EKO-35 can downregulate iron acquisition systems to alleviate the fitness cost associated with accumulation of these molecules. However, it is important to note that these experiments were performed in relatively nutrient-rich conditions. In addition, five categories were enriched in EKO-35, including bacterial flagellum, phosphate transport, nitrate assimilation, chemotaxis, and electron transport (FIG. 1H).

[0201] Next, comparative proteomics was applied to assess fluctuations in the proteome of EKO-35 in nutrient-limited conditions. Inventors identified a total of 2,019 proteins from whole cell extracts of the wild-type strain, which represented 46% of the predicted proteome. PCA defined significant separation between EKO-35 and the wild-type strain (Component 1, 53.2%), and biological variation (Component 2, 14%) (FIG. 2F). Compared to nutrient-rich conditions, a greater number of significant changes in protein abundances were identified: 188 proteins were significantly increased in the wild-type proteome, and 190 proteins were significantly increased in the EKO-35 proteome (FIGS. 2G and 2H). Similar to nutrient-rich conditions, EKO-35 displayed increased abundance of YddB and PqqL (>7-fold). However, inventors also observed increased abundance of nickel ABC transport component NikD, metabolic proteins (SdaA, GarL, DmlA), periplasmic chaperones (Spy and CpxP), and the efflux pump membrane fusion protein MdtA (Table 8). The abundance of Spy, CpxP, and MdtA is tightly controlled at the transcriptional level by the Cpx envelope stress response regulon, which is induced by extracellular stress or the disruption of periplasmic homeostasis. This shows that loss-of-efflux disrupted periplasmic homeostasis under nutrient-limitation. In the wild-type strain, AcrB was observed under both nutrient-limited and nutrient-rich conditions, reinforcing that AcrB is constitutively produced under standard laboratory conditions (Tables 7 and 8).

[0202] Similar to nutrient-rich conditions, annotation enrichment revealed few differences between the wild-type and EKO-35 proteomes using an FDR of 2%. When the FDR was increased to 5%, the wild-type proteome was enriched with categories including acetylation, tricarboxylic acid cycle, sugar transport, ubiquinone, and quinones (FIG. 2H). In the EKO-35 proteome, proteins with annotated subcellular localization in the cell inner membrane were enriched (FIG. 2H), further indicating membrane stress in EKO-35, which can be compensated by increased abundance of membrane-associated proteins to alleviate changes in membrane fluidity due to lack of efflux pumps, or the accumulation of endogenously produced physiological substrates. In addition, the increased abundance of proteins with annotated functions associated with metabolism in the wild-type strain shows the metabolism of EKO-35 was impacted due to loss-of-efflux under these conditions.

[0203] Finally, two proteins associated with the EKO-35 nonsynonymous mutations were detected in the proteomes of wild-type E. coli and EKO-35; PitA was significantly increased in the wild-type strain, supporting the notion that PitA can negatively impact EKO-35 fitness. Additionally, inventors also detected a higher abundance of RspB in the wild-type proteome, which is encoded in an operon with rspA, further supporting that the nonsynonymous mutation in rspA may mitigate an associated fitness cost. Indeed, EKO-35 can have both reduced protein abundance and mutated the corresponding genes to alleviate the fitness cost associated with loss-of-efflux.

### Characterizing EKO-35: Investigating Conditional Essentiality

[0204] E. coli is a versatile organism withstanding diverse and challenging environments. It is suggested the majority of efflux pumps are not constitutively produced under optimal growth conditions, which can underpin the observed dispensability of the drug efflux system (FIGS. 1B and 2A). Indeed, in nutrient-rich conditions inventors identified AcrB, YojI, and MdtK in the proteome of the wild-type strain, and AcrB, YojI, MdtK, and CusA in nutrient-limited conditions (Table 9). A significant number of efflux pumps were not identified in these conditions, indicating they can be differentially expressed, or that they are produced at levels that inventors were unable to detect.

[0205] To ascertain whether the E. coli efflux system becomes conditionally essential, inventors profiled EKO-35 growth under a range of different conditions. First, inventors confirmed the essentiality of drug efflux pumps for survival under extreme acid and alkaline conditions (FIG. 3A), Efflux pumps are frequently associated with pH homeostasis; for example, moderate acidic conditions increase the expression of mdtEF, mdtG, mdtlJ, and mdtL efflux genes, and the loss of MdtB and EmrB drug efflux pumps impacts fitness at extreme acidic pH. In addition, ΔtolC mutants show decreased fitness during extreme acid exposure. Efflux pumps (e.g., MdfA and MdtM) also contribute to alkalitolerance via Na⁺/(K⁺)/H⁺ antiport-based mechanisms, decreasing the cytoplasmic pH. As such, here inventors show that at pH values ≤5.5 and >8, the E coil efflux system is essential for growth (FIG. 3A). In addition, due to the abovementioned contribution of single component IM pumps to alkaline tolerance, EKO-35 shows pH dispensability patterns that differ from the ΔtolC mutant (FIG. 3A). To ensure the increased pH sensitivity was not associated with the nonsynonymous EKO-35 genomic mutations, growth of EKO-35 harboring the different ASKA clones—rspA, tufA, pitA, wcaC, gyrB, and yjfC—was assessed, revealing these genes were unable to restore the fitness of EKO-35 under acidic and alkaline conditions (FIGS. 9A-9D).

[0206] Since efflux pumps have also been associated with biofilm formation, inventors next explored whether loss-of-efflux impacted biofilm formation in E. coli. EKO-35 was propagated statically under both nutrient-rich and nutrient-limited conditions (FIGS. 3B and 3C), revealing loss-of-efflux enhanced biofilm formation compared to the wild-type strain in both conditions. In addition, the ΔtolC mutant exhibited biofilm phenotypes distinct to EKO-35. To investigate whether the phenotype was associated with the nonsynonymous mutations in EKO-35, the biofilms of EKO- and wild-type E, coil expressing rspA, tufA, pitA, wcaC, gyrB, and yjfC were characterized in nutrient-rich conditions. Expression of rspA significantly increased biofilm formation in both EKO-35 and the wild-type strain, whilst the remaining genes significantly lowered biofilm formation in both strains (FIGS. 10A and 10B) Overall, findings of this disclosure highlight that rspA, tufA, pitA, wcaC, gyrB, and yjfC are associated with biofilm formation in E. coli. Future studies should investigate whether the increase in EKO-35 biofilm formation is directly induced by loss-of-efflux, or is indirectly associated with efflux due to these apparently compensatory nonsynonymous mutations.

[0207] Next, inventors measured the growth kinetics of EKO-35 at 25° C., and under reduced oxygen concentrations, in both nutrient-rich and -limited conditions (Table 1). The lag-phase was significantly extended in nutrient-rich medium; however, no significant differences were identified in nutrient-limited medium (FIGS. 3D and 3E, and Table 1). Under low oxygen conditions, inventors observed the fitness of EKO-35 was impaired in the nutrient-rich medium (1% 02) at 37° C. (FIG. 3F and Table 1). Growth profiling of EKO-35 harboring the ASKA plasmids did not restore the observed phenotype (FIGS. 9A-9D). The addition of KNOB, which emulates the presence of nitrosative indole derivatives, further impacted EKO-35 fitness (FIG. 3G and Table 1). The MdtEF tripartite efflux assembly has been reported to contribute to fitness under anaerobic conditions, through the removal of toxic by-products produced during anaerobic respiration. However, an MdtF mutant (ΔmdtF) from the Keio Collection did not show any differences in growth (FIG. 3H). In contrast, expression of mdtEF in EKO-35 (EKO-35 araC::mdtEF strain) partially restored the growth of EKO-35 (Table 1), which supports the contribution of MdtEF to E. coli fitness under these conditions, and also shows that additional efflux genes can contribute to the observed phenotype.

[0208] Most notably, inventors observed that the E. coli drug efflux system is essential for growth in a nutrient-limited low-oxygen environment (5% O₂) (FIG. 3H). Measurement of EKO-35 growth kinetics (Table 1) revealed the strain remained in the lag phase for ˜18 h longer than the wild-type strain and was unable to enter the stationary phase during the duration of the experiment. This phenotype was not restored through the expression of genes harboring nonsynonymous mutations in EKO-35; in fact, the overexpression of pitA, tufA, and rspA decreased fitness further (FIGS. 9A-9D). Expression of mdtEF partially restored fitness (FIG. 3H). In addition, inventors also observed significant differences between the growth of EKO-35 and ΔtolC (FIG. 3H).

[0209] In summary, by profiling diverse growth conditions, inventors reveal instances where the fitness of EKO-35 is impacted due to loss-of-efflux. EKO-35 also exhibited phenotypes distinct to the ΔtolC mutant, which provides important biological insight into the physiological functions of drug efflux pumps. Indeed, EKO-35 is an important tool to further characterize the role of drug efflux pumps in physiological processes. The present findings highlight potentially compensatory nonsynonymous mutations that require further investigation.

EKO-35 Displays Differing Susceptibility Levels to a ΔtolC Mutant

[0210] Due to the observed phenotypic differences observed between EKO-35 and the ΔtolC mutant, inventors explored whether the strains also exhibited differences in susceptibility to growth inhibitors. Since inventors disrupted all drug efflux pumps known to form complexes with TolC, in addition to single component IM pumps, inventors posited it was likely EKO-35 would exhibit comparable—if not increased susceptibility—to antimicrobial agents.

[0211] Inventors curated and profiled a collection of compounds (n=52) with diverse physicochemical properties, including molecular weight (138.059 g/mol to 1449.27 g/mol), lipophilicity (log P −7.8597 to 5.823), aqueous solubility (log S −9.422 to and total polar surface area (PSA) (0 to 530.49 A2) (Table 10). This collection included well-described antibiotics, dyes, detergents, antiseptics, bile acids, and a subset of poorly characterized synthetic compounds (FIG. 12; compounds 1-19) recently identified as efflux substrates in E. coli. Inventors also included vancomycin as a permeability control, which is ordinarily unable to cross the OM, and is not a substrate for efflux 22.

[0212] Overall, EKO-35 and the ΔtolC mutant had similar susceptibility profiles for ˜65% (n=34) of the compounds, which were largely well-characterized antibiotics. However, the ΔtolC mutant was more susceptible to 31% of the profiled compounds, and a majority of these were the synthetic and poorly-characterized compounds (Table 10). These compounds also included novobiocin (4-fold difference) (Table 10), which inventors predicted could be due to the EKO-35 nonsynonymous mutation in gyrB (Table 5 and Table 6). Finally, EKO-35 was more susceptible to two compounds (acriflavine and ethidium bromide), which display relatively lower log P values (−1.9857 and −0.102, respectively) and a narrow molecular weight range (˜390 to 460 g/mol) (FIG. 4A and Table 10).

[0213] To investigate whether the differences in susceptibility between EKO-35 and ΔtolC were associated with the six missense mutations identified within the EKO-genome (FIGS. 13A-13D), inventors assessed the susceptibility of EKO-35 harboring the ASKA plasmids expressing rspA, tufA, pitA, wcaC, gyrB, and yjfC. It was not possible to assess the contribution of pitA to susceptibility since overexpression induced a lethal phenotype. Overall, the remaining genes did not impact the susceptibility of EKO-35 to these compounds, with the exception of gyrB overexpression, which increased novobiocin resistance due to target over production 57 (Tables 11A and 11B). Indeed, this phenotype was also observed in the ΔtolC strain (FIGS. 13A-13D). In addition, while profiling the ASKA EKO-35 strains, inventors only observed a 2-fold difference in novobiocin susceptibility between EKO-35 and ΔtolC, which is within the acceptable error range for these assays.

[0214] Finally, inventors also generated an EKO-35 porinated strain (EKO-35-Pore), through introduction of an open variant of the OM siderophore transporter FhuA, which herein will be denoted as a ‘pore’. The FhuA transporter is rendered non-selective through removal of a terminal plug domain and four large external loops, which enables production of a ‘pore’ with an internal diameter of ˜2.4 nm. This non-selective pore increases the influx of both hydrophilic and hydrophobic compounds, without affecting efflux. As described previously, inventors introduced the pore into the intergenic region between the glmS and pstS genes in the genome of EKO-35 and the wild-type strain, with gene expression under the control of a constitutive promoter. Growth of the EKO-35-Pore strain was comparable to EKO-35 under optimal conditions (FIG. 15B), and the genome sequence of this strain did not highlight any secondary mutations induced upon introduction of the pore. The pore was also introduced into the wild-type and ΔtolC strains. Inventors confirmed activity of the pore through susceptibility testing with the large antibiotic vancomycin (FIG. 15A).

[0215] Next, inventors profiled the wild-type, EKO-35 and ΔtolC porinated strains against the same curated collection of physicochemically diverse compounds (n=52), to gain insight into the physicochemical properties of compounds retarded by the OM and/or those that are susceptible to efflux (FIG. 4 and Tables 13A, 13B, 14A, and 14B). In regard to OM permeability, compared to the wild-type strain, the porinated wild-type strain displayed increased susceptibility to ˜23% of the compounds; the physicochemical properties of these compounds were quite diverse, including compounds with larger molecular weights (˜286 to 1449 g/mol), lower hydrophobicity (−6.751 to 5.823), and larger PSAs (71.11 to 530.49 Å²) (FIGS. 4A-4F and 15A-15G). The pore did not sensitize E. coli to a large number of compounds, showing that efflux plays a more significant role in intrinsic resistance. Indeed, EKO-35 was susceptible to 50% of the compounds, and the ΔtolC strain to ˜80%, demonstrating that active efflux contributes more significantly than OM retardation for the majority of the compounds (FIGS. 4A and 15A). These compounds were relatively smaller (˜204 to 823 g/mol), more hydrophobic (−3.15 to 5.823), exhibiting a narrower range of relatively lower PSAs (0 to 220 Å²) (FIGS. 15B-15G). Compromising the OM of EKO-35 (EKO-rendered the strain susceptible to 65% of the compounds, and the ΔtolC (ΔtolC-Pore) strain to ˜88% (FIGS. 4A and 15A). This observation supports the well-known synergistic relationship between OM diffusion and efflux, which significantly expanded the physicochemical properties of compounds exhibiting activity against E. coli (FIGS. 4C and 15C).

[0216] In summary, the porinated strains provide an additional tool kit to study the transport of compounds across the E. coli cell envelope, enabling dissociation between permeation across the OM and active efflux. Indeed, with an intact OM, the physicochemical properties of compounds that could be assessed using the presently disclosed platform would be limited to those that can permeate the OM; for example, the exclusion limit for porins is considered to be ˜600 g/mol. The pore overcomes the selectivity barrier of the OM, widening the physicochemical properties that could be profiled in this disclosure. In addition, the differing susceptibility levels of EKO-35 and the ΔtolC mutant emphasizes that while both strains can be considered efflux-deficient, inactivation of IM efflux pumps impacts susceptibility differently than inactivation of an OM channel. Therefore, functions distinct from these IM efflux pumps could be attributed to the TolC-associated resistance phenotypes. This observation highlights the utility of EKO-35 for the study of drug efflux across the cell envelope.

### Construction of an Efflux Pump Expression Platform

[0217] To demonstrate the use of EKO-35 as a tool to investigate the physicochemical substrate specificities of efflux pumps, inventors constructed an efflux platform consisting of strains individually expressing efflux pump-encoding genes. Inventors selected genes encoding pumps that form tripartite complexes with TolC (AcrB, AcrD, AcrEF, MdtEF, MdtBC, EmrAB, EmrKY, and MacAB). In addition, inventors included mexCD from P. aeruginosa—which can function with TolC⁶²—to show that EKO-35 can be used as a broad-spectrum tool to study efflux pumps from other bacterial species. Overall, the intent is for expansion of the platform to include additional efflux pumps of interest as needed.

[0218] First, inventors attempted to integrate each gene into the genome of EKO-35 using the pINT1 plasmid, which enables markerless integration of genes into araC, with gene expression under the control of the strong and constitutive P_{Bla} promoter. Inventors reasoned that integrated genes with constitutive expression would provide increased stability and circumvent the need for selective markers and inducers. However, inventors observed numerous deleterious mutations in a subset of the genes following ligation into this vector, and also following integration into the genome (data not shown). Consequently, inventors posited that the expression level could be too high and inventors instead integrated each gene using the pINT2 plasmid, which utilizes the relatively weaker and constitutive P_{LacI} promoter. Following genomic integration into araC and removal of the resistance cassette, each gene integration was confirmed using Sanger sequencing. The EKO-35 integrated strains will herein be referred to as EKO-35 araC::X, where X represents the gene of interest. As a proof of principle, comparison of AcrB levels between the wild-type, EKO-35, and EKO-35 araC::acrB strains confirmed the complementation system was functional and the protein was produced at higher levels than when the gene is expressed at the basal level (FIG. 1A).

[0219] To highlight the utility of EKO-35 for the investigation of efflux pump substrate profiles, the efflux genes mentioned above were also integrated into the genome of the wild-type E. coli BW25113 strain, and single deletion mutants corresponding to the pumps of interest. These strains, and the EKO-35 integrated strains, were profiled against known substrates for each respective efflux pump (Table 12). Since the wild-type strain harbors an intact drug efflux network, there were no differences in susceptibility when the efflux pump-encoding genes were expressed (FIGS. 14A and 14D-14H). Similarly, only one single efflux deletion strain—ΔacrB—displayed susceptibility profiles that differed from the parental strain (FIG. 14C). Indeed, the single efflux deletion mutants still harbor a relatively intact efflux network, which can mask the effects of other efflux pumps, emphasizing the need for a strain such as EKO-35. With the exception of EmrKY, for which inventors were unable to identify a known substrate, all of the integrated genes increased the resistance levels of EKO-35, confirming that each pump was functional (FIGS. 14A-14H).

[0220] In summary, due to the well-described differences in efflux pump basal expression levels, the developed efflux platform enables the study of efflux pumps in isogenic background(s) free of the masking effects of promiscuous pumps, with gene expression under the control of the same constitutive promoter. As such, this platform allows for the comparison of efflux pump substrate profiles, profiling of efflux pump inhibitors (EPIs), efflux pump interplay, and delineation of the molecular properties governing efflux, as described below.

### Defining the Physicochemical Substrate Profiles of Drug Efflux Pumps

[0221] To investigate the tripartite efflux pump substrate profiles, inventors determined the minimum inhibitory concentrations (MICs) of each compound in the curated collection against each strain within the efflux platform, for both the EKO-35 and EKO-35-Pore strains producing efflux pumps (FIGS. 4A, 4B and Tables 13A, 13B, 14A, and 14B). As described, this compound collection covered a diverse physicochemical space that enabled us to summarize the molecular properties that contribute to efflux in each pump (FIGS. 4C-4E and Tables 13A, 13B, 14A, 14B, 15A, 16A, 16B, and 17).

[0222] As anticipated, AcrB was associated with resistance to a significant subset (˜85%) of the compounds (FIG. 4B), supporting the described promiscuous nature of this tripartite pump. The introduction of the pore increased AcrB-mediated resistance to rifampicin, which is a large antibiotic significantly hindered by the OM²² (Tables 14A and 14B). The tripartite complexes AcrEF and MdtEF also conferred broad-spectrum resistance (70% and 52% of the compounds, respectively) (FIG. 4B). Expression of the pore in combination with all three of these pumps (AcrB, AcrEF, and MdtEF) increased resistance to sodium taurodeoxycholate and a poorly-characterized synthetic compound (compound 10), which are both hydrophobic molecules (log P values of 2.091 and 3.638, respectively) (FIG. 4B and Tables 14A and 14B). These changes did not alter the overall physicochemical properties of AcrB and MdtEF (FIGS. 4C-4E and Table 17). In addition, OM porination impacted the ability of AcrEF to confer resistance to nalidixic acid, trimethoprim, and benzalkonium chloride, which are relatively small molecules (FIG. 4B and Tables 14A, 14B and 17). Overall, these three pumps were polyspecific, demonstrating little preference for molecular weight or lipophilicity when compared to the other pumps profiled (FIG. 4C-4E and Tables 13A, 13B, 14A, 14B, and 17).

[0223] In contrast, AcrD and EmrAB decreased the susceptibility of EKO-35 to a smaller subset of compounds (30% and 33%, respectively) (Table 17). AcrD was associated with resistance to compounds with a narrower molecular weight range and PSA (FIGS. 4C and 4F), including non-polar compounds with positive log P values, contrary to previous reports that AcrD does not extrude hydrophobic molecules. Several known substrates for AcrD were confirmed (e.g., oxacillin, novobiocin, SDS, and deoxycholate); however, resistance to the aminoglycosides was not observed (FIG. 4B and Tables 13A and 13B). Indeed, despite previous studies showing increased susceptibility of E. coli to various aminoglycosides upon inactivation of acrD, inventors did not observe changes in susceptibility when acrD was inactivated (ΔacrD) in the wild-type K-12 strain, or when acrD was expressed in the ΔacrD or wild-type K-12 strains (FIGS. 16A-16D). Since aminoglycoside susceptibility can be affected by the growth medium, susceptibility testing was performed in both cation-adjusted Mueller Hinton II Broth (MHB II) and LB, showing similar results. These results are in agreement with a previous study reporting that AcrD in Salmonella enterica Serovar Typhimurium does not confer resistance to aminoglycosides. Finally, compromising the OM expanded the substrate profile of AcrD, however, the overall physicochemical profile was unaffected, and aminoglycoside resistance was not observed (FIGS. 4C-4E and Tables 13A, 13B, and 17).

[0224] In contrast to the broad substrate profiles of the RND efflux pumps, the remaining pumps were associated with resistance to a much smaller range of compounds. For example, EmrAB primarily conferred resistance to non-polar compounds spanning a small range of lipophilicity, including the uncoupler CCCP, which is consistent with previous studies. EmrAB no longer provided resistance to CCCP in the porinated strain, and was instead associated with resistance to fusidic acid and synthetic compound 10 (FIG. 4B, Tables 14A, 14B, and 17). MacAB and MdtBC conferred resistance to only 6% of the compounds (FIG. 4B and Tables 13A and 13B); consistent with previous reports, MacAB was specific for macrolides (erythromycin and azithromycin). However, MacAB with a porinated OM reduced the MIC of azithromycin to only 2-fold greater than EKO-35, which is within the acceptable error range for these assays (FIG. 4B and Tables 14A and 14B). MdtBC conferred resistance to novobiocin and deoxycholate, as previously reported (FIG. 4B, Tables 13A and 13B). Introduction of the pore additionally associated MdtBC with resistance to sodium taurodeoxycholate (FIG. 4B, Tables 14A and 14B), supporting a role in bile salt tolerance. Production of MdtBC in combination with the pore was also associated with resistance to daunorubicin and doxorubicin, substantially expanding the lipophilicity range of this pump (FIG. 4D and Table 17). EmrKY did not increase EKO-35 resistance to any of the compounds profiled, even when the OM was compromised (FIG. 4B and Tables 13A, 13B, 14A, and 14B).

[0225] Finally, inventors also profiled the MexCD pump from P. aeruginosa to demonstrate the use of EKO-35 as a tool for the study of bacterial efflux pumps from other bacterial species. MexCD conferred resistance to ˜55% of compounds profiled, many of which were known substrates, in addition to six of the poorly-characterized compounds (FIG. 4B and Tables 13A and 13B). These compounds were chemically unrelated, which was consistent with the polyspecific substrate profiles of the other multidrug-resistant RND pumps profiled (AcrB, AcrEF, and MdtEF) (FIG. 4B). Furthermore, compromising the OM no longer associated MexCD with resistance to puromycin, azithromycin, deoxycholate, and synthetic compound 13, and instead increased resistance to norfloxacin, sodium taurodeoxycholate, and synthetic compound 10 (FIG. 4B). However, these changes did not affect the overall physicochemical substrate profile, and therefore the polyspecificity of MexCD (FIGS. 4C-4E).

[0226] Overall, porinating the OM of the EKO-35 efflux-integrated strains did not substantially affect the activity of the efflux pumps, including their overall physicochemical substrate profiles. However, inventors did identify additional substrates when the OM was compromised, revealing that efflux pumps have expanded substrate profiles in environments that increase OM permeation. In the few instances (e.g., AcrEF, MacAB, and MexCD) where inventors observed decreased efflux-mediated resistance following introduction of the pore, it is possible that increased permeation overwhelmed the pump. However, the findings of the present disclosure indicate that efflux pumps can function robustly even when the OM is compromised.

### EKO-35 and the Efflux Platform can be Used to Evaluate the Specificity of Efflux Pump Inhibitors

[0227] Due to their role in antibiotic resistance, efflux pumps are attractive antibacterial targets. Indeed, an inhibitor of a polyspecific efflux pump, such as AcrAB, could simultaneously enhance the activity of numerous antibiotics against resistant strains. Phenylalanine-Arginine 8-Naphthylamide (PAβN) is one of the best-studied efflux pump inhibitors (EPIs), which inhibits AcrAB and its homologues, including numerous P. aeruginosa pumps (e.g., MexAB-OprM, MexCD-OprJ, MexXY-OprM, and MexEF-OprN). In addition, several arylpiperazines have been associated with E. coli efflux inhibition, including 1-(1-naphthylmethyl)-piperazine (NMP). Here, using PAβN and NMP as a proof of concept, inventors show EKO-35 and the developed efflux platform can be used to assess the specificity of EPIs.

[0228] First, inventors assessed PAM and NMP synergy with various antibiotics by checkerboard analysis against the efflux-deficient strains, EKO-35, EKO-35 acrB_{D408A}, and ΔtolC, in addition to the wild-type strain (FIGS. 5A-5J and Tables 18A, 18B, 19A, and 19B). Both EPIs synergized with several antibiotics in the wild-type strain (FIG. 5). PAM is an efflux substrate, albeit a poor substrate that reduces the extrusion of other substrates. The compound also exhibits antibacterial activity, which is enhanced upon efflux inactivation (Tables 18A and 18B). In contrast, the susceptibility of the efflux-deficient strains was comparable to the wild-type strain for NMP, indicating the compound inhibits efflux in a different way, or does not exhibit antibacterial properties (Tables 19A and 19B). Consistent with the observation that PAM permeabilizes membranes in a concentration-dependent manner, the EPI synergized with various antibiotics in the efflux-deficient strains, including oxacillin, novobiocin, fusidic acid, and erythromycin (FIGS. 5A-5C and Tables 18A and 18B). However, PAM was not synergistic in these strains in combination with linezolid, which can more readily penetrate the OM (FIG. 5C and Table 18A and 18B). NMP did not exhibit synergy with the majority of the antibiotics against EKO-35 and EKO-35 acrB_{D408A} (FIG. 5D-5F and Tables 19A and 19B). However, inventors did observe low-level synergy with erythromycin, and also synergy with ethidium bromide against ΔtolC (FIGS. 5D and 5F and Tables 19A and 19B). Overall, the findings show NMP does not exhibit the same OM permeability permeabilizing properties as PaβN, consistent with previous findings indicating NMP only destabilizes membranes at concentrations exceeding 250 μg/mL (Tables 19A and 19B).

[0229] Acknowledging that distinguishing EPI permeabilizing properties from efflux inhibition is a challenge, inventors next utilized the porinated strains to assess synergy, predicting that synergy would be lost in the porinated strains. Indeed, inventors observed that PaβN was no longer synergistic in combination with erythromycin, novobiocin, and oxacillin against the porinated efflux-deficient strains (FIGS. 5A, 5D and 5F, and Table 18A and 18B). However, synergy was maintained for fusidic acid (FIG. 5B and Tables 18A and 18B). Similarly, NMP was no longer synergistic in combination with erythromycin, indicating the compound exhibits weak OM permeabilizing properties (Tables 19A and 19B). Overall, the results demonstrate that profiling EPIs against efflux-deficient strains like EKO-35 and the EKO-35-Pore derivative is an important step during the characterization of such compounds.

[0230] Next, inventors investigated EPI specificity against both EKO-35 and the EKO-35-Pore strain producing different efflux pumps, by assessing synergy with identified antibiotic substrates for each pump (FIGS. 5G-5J, Tables 18A, 18B and Tables 19A and 19B). Use of the porinated strains enabled isolation of efflux pump inhibition from OM permeabilizing properties, and inventors observed distinct phenotypes for different efflux pumps and antibiotic combinations (FIGS. 5A-5F, Tables 18A, 18B, 19A, and 19B). For example, PAM was synergistic in combination with all of the antibiotics profiled against the EKO-35 porinated strain expressing acrB and acrF, and no synergy was observed for the functionally inactive AcrB variant (FIG. and Tables 18A and 18B). In contrast, when acrD was expressed in the porinated strain, synergy was lost for novobiocin, yet was still observed for oxacillin and erythromycin. Similarly, synergy was lost for ciprofloxacin in EKO-35-Pore expressing the P. aeruginosa pump mexCD. Overall, the findings show that PAM exhibits different levels of inhibition and specificity against the various efflux pumps and their antibiotic substrates (Tables 18A and 18B).

[0231] Overall, NMP is not as potent as PAβN, providing relatively higher fractional inhibitory concentration index values (FICIs) (FIGS. 5A-5F). Additionally, inventors demonstrate that, with the exception of potentiating ethidium bromide against the strain producing AcrEF, NMP is specific for AcrB, enhancing the activity of ethidium bromide, fusidic acid, linezolid and oxacillin in the porinated strain producing AcrB (FIGS. 5A-5F and Tables 19A and 19B).

[0232] In summary, EKO-35 and the efflux platform are important tools for the assessment of candidate EPIs, enabling differentiation between compounds that permeabilize membranes, which increases the influx of antibiotics, and those that solely act as EPIs. In addition, there are major limitations associated with investigating EPI specificity in strains harboring intact drug efflux networks. EKO-35 and the efflux platform overcome these limitations, enabling users to systematically assess inhibition of each efflux pump within the platform.

### Investigating Efflux Pump Functional Interplay Using EKO-35 as a Simplified Genetic Background

[0233] Previous studies revealed the combination of structurally distinct efflux pumps—single component inner membrane efflux pumps and tripartite systems, which span the cell envelope—can confer multiplicative effects on resistance. Specifically, the combination of these two pump types confers a fold increase—or multiplicative effect—on resistance that is equal to or greater than the product of the fold increases conferred by the individual efflux pumps alone. An additive effect is observed when the fold increase in resistance equates to the sum of the individual efflux pumps alone. Interplay is considered to be the result of single component inner membrane pumps effluxing compounds to the periplasm, where tripartite systems can then access these compounds, extruding to the outside of the cell. Indeed, AcrB was shown to only provide robust resistance to ethidium bromide and acriflavine when single component pumps are present, since AcrB is considered to only access substrates from the outer leaflet of the inner membrane and the periplasm. Therefore, for compounds with cytoplasmic targets, such as acriflavine and ethidium bromide, it is possible that tripartite efflux systems rely on single component inner membrane pumps to first efflux substrates to the periplasm. However, inventors observed that with the exception of ethidium bromide and acriflavine, the overexpression of acrB alone restored the sensitivity of EKO-35 to levels comparable, if not greater, than those observed in the wild-type strain for the majority of compounds profiled in this disclosure (Tables 13A and 13B). Thus, AcrB provides robust efflux independent of single component inner membrane pumps for a wide range of compounds with diverse physicochemical properties. Indeed, findings of this disclosure show that permeation across the cell envelope is sufficiently rate limiting, since the tripartite pumps can access the drugs from the periplasm and the inner-membrane outer leaflet as they are diffusing.

[0234] To demonstrate the use of EKO-35 to study efflux pump interplay, the inner membrane efflux pump EmrE was introduced into EKO-35 strains with integrated RND tripartite efflux pumps (AcrB, AcrEF, AcrD, and MdtEF) using the pGDP2 plasmid (pGDP2:emrE), which features the constitutive P_{LacI} promoter. Inventors then assessed resistance to ethidium bromide and acriflavine, since AcrB alone did not restore resistance to wild-type levels. Overall, inventors observed that the combination of EmrE with all three tripartite systems conferred multiplicative effects for both ethidium bromide and acriflavine (FIG. 5G-5J and Table 20). AcrB and AcrEF conferred a higher-level of resistance alone to these compounds; as such, the multiplicative effects of these pumps with EmrE was substantially greater than AcrD and MdtEF. Inventors also included novobiocin and minocycline as negative controls that were not extruded by EmrE, and inventors did not observe synergy (FIGS. 17A-17D and Table 20).

[0235] Next, inventors predicted that interplay can be more apparent when the OM is compromised, causing a greater influx of the compounds into the cell. To investigate, the EKO-35-Pore strains were profiled using the same approach. Overall, the multiplicative effects were maintained for the majority of the pump combinations, with the exception of AcrD with acriflavine, where the multiplicative effect was lost, and AcrD did not increase resistance to acriflavine when produced alone or in combination with EmrE (FIGS. 5G-5J and Table 20).

### Discussion

[0236] Bacterial drug efflux networks are expansive and poorly characterized, extending beyond archetypal pumps (e.g., AcrB) that are well-studied due to their polyspecific transporting capabilities. However, the substrate specificity and functions of many efflux pumps remain poorly understood, which can be attributed to the complexities of these systems, including differential gene expression and a high degree of functional redundancy. Here, inventors describe the generation of EKO-35, a simplified genetic background to address the described limitations of the efflux field. This strain can be used to study the functions and physicochemical substrate specificities of individually introduced efflux pumps, to assess the mechanism of action and efficacy of EPIs, and to study efflux pump interplay.

[0237] Inventors' ability to inactivate such a significant number of efflux pumps within the E. coli genome has provided important biological insight. Despite the high degree of functional redundancy, at least in terms of antibiotic detoxification, the E. coli drug efflux system is highly conserved. Conservation shows these proteins could contribute to physiologically essential roles, in addition to their well-described ability to extrude clinically important antibiotics. Indeed, numerous physiological functions have been associated with drug efflux pumps. For example, the TolC OM channel is broadly implicated in enterobacterial physiology. Inactivation causes pleiotropic phenotypes, including severe growth defects in nutrient-limited conditions. As described, MdtEF-TolC has been associated with the detoxification of nitrosative derivatives produced during anaerobic respiration. In addition, many E. coli efflux pumps have been associated with the extrusion of enterobactin, MdtJI exports the polyamine spermidine, and SugE is a guanidinium ion efflux pump.

[0238] Despite the contribution of these proteins to the maintenance of cellular homeostasis, here inventors show the E. coli drug efflux system is dispensable under optimal growth conditions (FIG. 1B), including during nutrient-limitation (FIG. 2A). Membrane-enriched comparative proteomics revealed only minor changes to the proteome of EKO-35 in nutrient-rich medium; however, numerous adaptations were observed in nutrient-limited medium (FIGS. 1A and 2B). While it was possible to inactivate such a significant number of IM efflux pumps, inventors did identify six nonsynonymous mutations during the generation of EKO-35 (FIG. 6). The overexpression of wild-type unmutagenized copies of these genes, using plasmids isolated from ASKA clones harboring the rspA, tufA, pitA, wcaC, gyrB, and yjfC genes, revealed a significant reduction in EKO-35 fitness under nutrient-rich optimal growth conditions for all of these genes. The fitness of the wild-type strain was also reduced by the overexpression of pitA, tufA and rspA. In addition, pitA and rspA overexpression was lethal, and wcaC negatively impacted fitness, in both EKO-35 and the wild-type strain in nutrient-limited conditions (FIGS. 8A (left) and 8C-8E (left)). EKO-35 was generated in a nutrient-rich medium, and the observation that the nonsynonymous mutations occurred in genes that are associated with EKO-35 fitness show they could be compensatory in nature (FIGS. 8A-8F (left)). Indeed, the findings show that the mutations could have been induced in response to loss-of-efflux, to enhance EKO-35 fitness, which could explain why the strain only exhibits minor changes in growth kinetics in nutrient-rich and nutrient-limited conditions (FIGS. 1B and 2A).

[0239] In support of efflux-associated physiological functions, inventors show the E. coli efflux network is conditionally essential. Indeed, the introduction of wild-type copies of the above mentioned genes did not restore the conditionally essential phenotypes described in this disclosure, showing these phenotypes correlate with loss-of-efflux pumps directly. The fitness of EKO-35 was significantly impacted under acid and alkali stress (FIG. 3A), in accordance with previous studies associating efflux pumps with pH homeostasis. Most striking was the observation that efflux is essential for growth in a nutrient-limited low oxygen environment (FIG. 3F), and findings of this disclosure highlight that other pumps can be associated with this phenotype, in addition to MdtEF-mediated extrusion of toxic by-products during anaerobic respiration. Finally, during the phenotypic characterization of EKO-35, inventors were surprised to observe differing growth phenotypes in comparison to the ΔtolC mutant. Indeed, while it is clear efflux pumps contribute to physiological processes, TolC inactivation induces a different and apparently pleiotropic cellular response that is not observed in EKO-35. Overall, these findings open the way for future studies to investigate the efflux pumps and underlying mechanisms associated with the identified conditionally essential phenotypes; the described efflux platform is ideal for such studies. In addition, by performing an in-depth assessment of EKO-35, inventors provide a well-characterized strain for the study of efflux pump functions and physicochemical substrate profiles.

[0240] To the best of inventors' knowledge, EKO-35 is the most efflux-deficient mutant to be reported. As such, this strain is highly susceptible to numerous antimicrobial agents (Tables 13A and 13B). Similar to the observed phenotypic differences, EKO-35 exhibited differing susceptibility levels to the ΔtolC mutant. Importantly, most of the well-characterized antibiotics inhibited the growth of both strains comparably, indicating tripartite efflux pumps are primarily responsible for extruding these compounds, and are the major contributors to resistance in the efflux network. However, numerous compounds exhibited increased activity against the ΔtolC mutant, despite the lack of tripartite efflux pumps in EKO-35. Most of these were the poorly characterized synthetic compounds (Tables 10A and 10B, compounds 1-19). Inventors have shown these differences were not associated with the nonsynonymous mutations, since the introduction of wild-type copies of these genes did not increase the susceptibility of EKO-35 (FIGS. 13A-F). Porination of the OM only increased the susceptibility of EKO-35 to two of the synthetic compounds that were originally inactive against EKO-35 (FIGS. 15A and 15B and Table 10), indicating that the OM of ΔtolC could be more permeable than EKO-35 in these instances. Indeed, the inactivation of tolC leads to membrane stress, which has been suggested to contribute significantly to its increased susceptibility to multiple antibiotics. However, the remaining synthetic compounds did not impact the susceptibility of the EKO-35-Pore strain, showing that permeability did not underlie the differences observed between ΔtolC and EKO-35. Clearly, loss of IM efflux pumps impacts susceptibility differently than deletion of an OM channel, which shows that TolC is associated with other functions related to these resistance phenotypes. As such, this should be taken into account when using ΔtolC mutants to study drug efflux. Indeed, EKO-35 is an important addition to the arsenal of tools to explore the movement of compounds across the cell envelope.

[0241] With an intact OM, the physicochemical properties that can be assessed using EKO-35 and the efflux integration platform would be limited to those that can penetrate the OM, which would restrict the molecular weight range to compounds <600 g/mol. To overcome this limitation, a pore was introduced into the wild-type, ΔtolC, EKO-35, and EKO-35 efflux pump-integrated strains, which enabled uncoupling of the contributions of influx and efflux. Inventors show that efflux contributed more significantly than OM permeability to the intrinsic resistance of E. coli, and compromising both the OM and efflux increased susceptibility to a wide range of compounds (FIGS. 4A, 4B, and 15A). Overall, compromising the OM of EKO-35 significantly broadened the physicochemical properties that could be profiled with the efflux platform, while maintaining efflux pump activity.

[0242] Previously, different approaches have been taken to investigate the E. coli drug efflux system. Sulavik et al., individually inactivated 16 efflux pumps and profiled these strains against a panel of 20 toxic molecules. Due to efflux pump functional redundancies, and differential expression levels, there are limitations associated with this approach. Nishino & Yamaguchi individually expressed 37 efflux pump-encoding genes in an AcrAB-devoid host, and subsequently profiled 26 toxic molecules. Both studies substantiated AcrAB-TolC as the major contributor to intrinsic resistance. A subset of additional efflux pumps were associated with resistance to a proportion of the compounds, but a large number did not provide resistance phenotypes. Additional studies have also investigated E. coli efflux using tolC inactivated mutants, to ascertain molecular features of compounds amenable to efflux. Since TolC is the predominant gate keeper for extrusion across the OM in E. coli, the study of tolC mutants represents loss of efflux as a whole, and provides important information relating to the properties of compounds that are susceptible to efflux by tripartite systems. However, little insight is provided into the physicochemical substrate specificities of the IM pump components. In addition, as described above, tolC inactivation causes pleiotropic effects that appear to be distinct from loss of drug efflux pump functions. Therefore, there are limitations associated with the use of tolC mutants to study drug efflux, which are overcome by EKO-35.

[0243] Construction of the developed efflux platform enabled us to assess the physicochemical substrate profiles of E. coli efflux pumps forming tripartite complexes with TolC. Inventors also included MexCD from P. aeruginosa, showing that the platform can be used to study pumps from other organisms. The efflux platform was built upon an isogenic and highly susceptible background (EKO-35), with gene expression under the control of the same constitutive promoter. Such an approach enabled direct comparisons to be made between strains and inventors were able to summarize molecular properties that contribute to efflux in each pump (FIGS. 4C-4F). Inventors revealed that AcrB, AcrEF, MdtEF, and MexCD exhibited polyspecific redundant substrate profiles, with little specificity for molecular weight, aqueous solubility or polar surface area (FIG. 4C-4F). AcrB and AcrEF mediated resistance to a wide array of hydrophilic and lipophilic compounds, and MdtEF was associated with resistance to more lipophilic substrates. AcrD provided resistance to a smaller subset of compounds that were mostly lipophilic and fell within a narrower molecular weight range (˜285 to 613 g/mol). EmrAB also exhibited resistance to a smaller fraction of the compounds, which displayed more specific criteria, including lipophilicity and a molecular weight ranging from 205-613 g/mol. MacAB was specific for macrolides, MdtBC for bile salts, and inventors were unable to identify any substrates of EmrKY. While EmrKY is a homologue of EmrAB, the pump has only been associated with resistance to deoxycholate, which inventors could not substantiate. Overall, despite a subset of the pumps appearing to have evolved to extrude specific substrates (e.g., MacAB and MdtBC), a significant number of the pumps were polyspecific and thus functionally redundant. When examined phylogenetically, these RND pumps (AcrB, AcrF, and MdtF) cluster together, which can be indicative of their multidrug-resistant functions. The clustering of AcrF and MdtF can explain the similarities observed in the physicochemical substrate profiles of these homologous proteins (Teelucksingh & Thompson et al., 2020) (FIGS. 4C-4F). In addition, the P. aeruginosa MexCD pump exhibited comparable resistance profiles to these two pumps. In the case of AcrB, this polyspecific phenotype appears to be an ancient and conserved trait. It is unclear why all three polyspecific pumps have been conserved across the E. coli species. Combined, the redundant polyspecific nature of these efflux pumps highlight the challenges of designing new antibacterial agents that overcome efflux.

[0244] Previous studies indicate that molecular weight and hydrophobicity are key factors impacting compound susceptibility to efflux; specifically, compounds exhibiting molecular weights between 300 and 700 g/mol are more susceptible to efflux. Findings from this disclosure were consistent with these observations, yet inventors observed a slightly larger molecular weight range through EKO-35 susceptibility testing, identifying compounds ranging from −227 to 750 g/mol as being susceptible to efflux (FIG. 15C). Indeed, numerous efflux pumps (AcrB, AcrEF, MdtEF, and MacAB) were associated with resistance to compounds >700 g/mol (FIG. 4C, Table 17). In addition, when the OM was compromised, AcrB provided resistance to rifampicin (MW=822.95 g/mol). Hydrophobic molecules have also been reported to be more susceptible to efflux than hydrophilic molecules. In this disclosure, efflux activity was only observed for compounds with log P≥−1.986; however, ˜33% of compounds active against EKO-35 were hydrophilic (Tables 10 and 17). Additionally, several hydrophobic compounds were inactive against EKO-35 (Table 10). Inventors also identified a subset of compounds that meet these molecular weight and hydrophobicity criteria, but were inactive against EKO-35 (Table 10). Altogether, findings of this disclosure show that molecular weight and hydrophobicity are not a prerequisite for efflux; the charge, globularity, flexibility, and stability of compounds are also important physicochemical properties governing the influx and efflux of compounds.

[0245] It is possible that efflux pump interplay could impact the substrate profiles of tripartite efflux pumps; as described, interplay refers to synergistic relationships between tripartite systems and single component IM pumps. However, inventors show the production of AcrB alone can restore the susceptibility of EKO-35 to wild-type levels for most compounds profiled. Indeed, acriflavine and ethidium bromide were the only compounds that tripartite pumps appeared to rely on contributions from single component inner membrane pumps to provide robust resistance (FIGS. 5G-5J). Inventors show the efflux platform is ideal for studying efflux pump interplay, which would otherwise be complicated by the complexities of the E. coli drug efflux network. Future studies could harness EKO-35 and the platform to investigate further instances of efflux pump interplay.

[0246] In addition to investigating efflux pump physicochemical substrate profiles, the efflux platform can also be used to evaluate EPIs. As a proof of principle, inventors assessed synergy of the EPIs PAβN and NMP with various antibiotics (Table 12 and FIGS. 5A-5F). Since decreased permeability and active efflux synergistically contribute to intrinsic resistance, it is difficult to ascertain the mechanism of action of antibiotic adjuvants such as EPIs. Uncoupling influx from efflux inhibition, through the use of the EKO-35-Pore strain and the integrated efflux pump library, can provide important insight into EPI mechanism(s) of action. Indeed, inventors propose that candidate EPIs are routinely profiled against the efflux-deficient strains, EKO-35 and EKO-35-Pore, providing insight into whether an EPI confers pleiotropic effects, including membrane destabilization, as exemplified by PAβN. In addition, profiling EPIs against the EKO-35-Pore strain producing individual efflux pumps provides insight into the pump specificity of EPIs. Indeed, findings of this disclosure highlight that both PAβN and NMP exhibit efflux pump inhibition; however, each inhibitor exhibits differing efflux pump specificities, including potentiation of different antibiotic substrates. There is precedent underlying this observation in the literature; PAβN is predicted to bind both the binding pocket groove and cave regions of AcrB, which enables the EPI to potentiate a diverse range of compounds with affinity for either binding site (e.g., novobiocin and oxacillin) (FIGS. 5A-5C). In addition, PAβN has been shown to inhibit AcrB primarily through perturbation of drug-binding structural dynamics, rather than competitive binding, which could underlie the compound's ability to potentiate such a wide range of antibiotics. In addition, inventors show that PAβN is a broad-spectrum inhibitor both in terms of antibiotic potentiation and efflux pump specificity (FIG. 5A-5C). In contrast, NMP is predicted to bind solely to the binding pocket cave and, as such, NMP largely potentiates cave binding compounds (e.g., ethidium bromide) (FIGS. 5D-5F). Finally, inventors show that for the most part NMP exhibits specificity for AcrB (FIGS. 5D-5F). In summary, the efflux platform provides an essential tool to deconvolute EPI mechanism(s) of action.

[0247] In conclusion, efflux pumps are a major contributor to the intrinsic antibiotic resistome of Gram-negative pathogenic bacteria. Understanding the molecular properties that influence efflux is key for overcoming these resistance mechanisms. It is important that all efflux pumps are considered since inventors have a poor understanding of the fitness advantage conferred by each pump during the bacterial lifecycle. The efflux platform represents an innovative tool kit to fully dissect the movement of compounds across the cell envelope, providing a unique opportunity for users to introduce desired combinations of efflux pumps, and to also probe the relationship and balance between permeation and active efflux. Overall, EKO-35 and the developed platform will be an important resource to the efflux field, which can be used to profile efflux pumps of interest, to assess physiological functions and substrate specificities, and ultimately assist the design of new antibacterial agents and EPIs.

TABLE 5
EKO-35 genomic mutations. Single nucleotide polymorphisms
were identified relative to the parent E. coli BW25113
K-12 (Grenier et al. 2014) genome (List #1).

| | | | | Efflux |
|---|---|---|---|---|
| | | | | gene |
| | Base | | | associated |
| | pair | | | with the |
| Gene | mutation | Mutation | Gene Function | mutation |
| gntU | G489A | Silent | Gluconate transporter | mdtF |
| pitA | T1433A | V478E | Metal phosphate:H⁺ sympoter | mdtF |
| yjfC | A470G | E157G | Putative acid-amine ligase | mdtF |
| tufA | C677T | T2261 | Elongation factor Tu | ydeA |
| tig | C225T | Silent | Chaperone protein known as | mdtB |
| | | | Trigger Factor F. Specifically | |
| | | | interacts with nascent proteins | |

TABLE 6
EKO-35 genomic mutations. Single nucleotide polymorphisms
were identified relative to the parent E. coli BW25113
K-12 (Grenier et al. 2014) genome (List #2).

| | Base | | | Efflux gene |
|---|---|---|---|---|
| | pair | | | associated |
| | muta- | Muta- | | with the |
| Gene | tion | tion | Gene Function | mutation |
| rpsA | T795A | D265E | 30S ribosomal subunit protein | mdtB |
| | | | S. The largest of the ribosomal | |
| | | | proteins | |
| wcaC | A355C | K119Q | Galactosyltransferase | mdtB |
| | | | predicted to be involved in | |
| | | | colonic acid biosynthesis | |
| ybdK | G834A | Silent | Carboxylate-amine ligase | mdlB |
| gyrB | G373T | A125S | Type II topoisomerase that | cusA |
| | | | negatively supercoils circular | |
| | | | double stranded DNA | |
| yebS | G639A | Silent | Inner membrane protein | cusA |
| | | | predicted to contribute to | |
| | | | membrane integrity | |

TABLE 7
Quantitative comparative proteomic analysis revealed statistically
significant differentially abundant proteins between EKO-35 and
the wild-type E. coli K-12 strain in nutrient-rich conditions.
Comparative analysis was performed with proteins identified
in at least three biological replicates (1,979 proteins), statistical
analysis was performed using a Student's t-test (P-value ≤0.05,
FDR = 0.05, SO = 1).

| | | Fold | | | |
|---|---|---|---|---|---|
| | Protein | differ- | | | |
| Strain | IDs | ence | P-value | Gene | Protein |
| EKO- | P31828 | 8.63 | 2.09E−07 | pqqL | Putative TonB- |
| 35 | | | | | dependent |
| | | | | | receptor YddB |
| EKO- | P31827 | 7.92 | 1.39E−06 | yddB | Periplasmic |
| 35 | | | | | metalloprotease PqqL |
| EKO- | P76520 | 7.87 | 7.75E−08 | yfdX | Uncharacterized |
| 35 | | | | | protein YfdX |
| EKO- | P04949 | 4.96 | 1.84E−03 | fliC | Flagellin filament |
| 35 | | | | | protein FliC |
| EKO- | P02942 | 4.31 | 4.40E−03 | tsr | Methyl-accepting |
| 35 | | | | | chemotaxis protein I |
| EKO- | P77754 | 4.09 | 2.69E−03 | spy | Periplasmic chaperone |
| 35 | | | | | Spy |
| EKO- | P05706 | 3.88 | 2.06E−03 | srlB | Sorbitol-specific |
| 35 | | | | | phosphotransferase |
| | | | | | enzyme IIA component |
| | | | | | SrlB |
| EKO- | P56579 | 3.87 | 9.81E−04 | srlA | Sorbitol permease |
| 35 | | | | | phosphotransferase |
| | | | | | enzyme IIC2 component |
| | | | | | SrlA |
| EKO- | P00634 | 3.69 | 5.03E−04 | phoA | Alkaline phosphatase |
| 35 | | | | | PhoA |
| EKO- | P28861 | 3.66 | 1.49E−04 | fpr | Ferredoxin--NADP⁺ |
| 35 | | | | | reductase Fpr |
| K-12 | P13036 | −2.64 | 2.59E−02 | fecA | Ferric citrate outer |
| | | | | | membrane transporter |
| | | | | | FecA |
| K-12 | POAAEO | −2.66 | 6.34E−03 | cycA | D-serine/D- |
| | | | | | alanine/glycine/:H⁺ |
| | | | | | symporter CycA |
| K-12 | P15028 | −2.74 | 1.76E−03 | fecB | Ferric citrate ABC |
| | | | | | transporter periplasmic |
| | | | | | binding protein FecB |
| K-12 | P33941 | −3.04 | 9.63E−04 | yojl | ABC efflux pump Yojl |
| K-12 | P38105 | −3.25 | 1.30E−03 | rspB | Putative zinc-binding |
| | | | | | dehydrogenase RspB |
| K-12 | POC058 | −3.48 | 1.57E−03 | ibpB | Small heat shock protein |
| | | | | | IbpB |
| K-12 | POA7B8 | −3.69 | 3,18E−04 | hsIV | ATP-dependent protease |
| | | | | | subunit HsIV |
| K-12 | POC054 | −3.90 | 2.31E−03 | ibpA | Small heat shock protein |
| | | | | | lbpA |
| K-12 | P15031 | −4.76 | 1.49E−02 | fecE | Ferric citrate ABC |
| | | | | | transporter ATP binding |
| | | | | | subunit FecE |
| K-12 | P31224 | −5.69* | 1.31E−04 | acrB | Multidrug efflux pump |
| | | | | | subunit AcrB |

*AcrB fold difference was calculated through imputation using a normal distribution.

TABLE 8
Quantitative comparative proteomic analysis revealed statistically
significant differentially abundant proteins between EKO-35 and
the wild-type E. coli K-12 strain in nutrient-limited conditions.
Comparative analysis was performed with proteins identified
in at least three biological replicates (2,019 proteins), statistical
analysis was performed using a Student's t-test (P-value ≤0.05,
FDR = 0.05, SO = 1).

| | | Fold | | | |
|---|---|---|---|---|---|
| | Protein | differ- | | | |
| Strain | IDs | ence | P-value | Gene | Protein |
| EKO- | P31827 | 8.70 | 1.05E−05 | yddB | Putative TonB- |
| 35 | | | | | dependent receptor |
| | | | | | YddB |
| EKO- | P77754 | 7.56 | 1.47E−05 | spy | Periplasmic chaperone |
| 35 | | | | | Spy |
| EKO- | P31828 | 7.04 | 5.63E−06 | pqqL | Periplasmic |
| 35 | | | | | metalloprotease PqqL |
| EKO- | P33593 | 6.07 | 1.73E−05 | nikD | Nickel ABC transporter |
| 35 | | | | | ATP binding subunit |
| | | | | | NikD |
| EKO- | P76397 | 5.66 | 1.52E−06 | mdtA | Multidrug efflux pump |
| 35 | | | | | membrane fusion |
| | | | | | protein MdtA |
| EKO- | P21865 | 5.50 | 1.10E−05 | kdpD | Sensor histidine kinase |
| 35 | | | | | KdpD |
| EKO- | POAE85 | 5.09 | 4.59E−06 | cpxP | Periplasmic protein |
| 35 | | | | | CpxP |
| EKO- | P16095 | 4.98 | 5.29E−05 | sdaA | L-serine dehydratase 1 |
| 35 | | | | | SdaA |
| EKO- | P23522 | 4.96 | 8.72E−05 | garL | 5-keto-4-deoxy-D- |
| 35 | | | | | glucarate aldolase GarL |
| EKO- | P76251 | 2.28 | 2.28E−02 | dmlA | D-malate |
| 35 | | | | | dehydrogenase DmlA |
| K-12 | P13036 | −4.15 | 2.07E−03 | agp | Glucose-1-phosphatase |
| | | | | | Agp |
| K-12 | POAAEO | −4.16 | 1.89E−05 | pitA | Low-affinity inorganic |
| | | | | | phosphate transporter 1 |
| | | | | | PitA |
| K-12 | P15028 | −4.22 | 1.17E−07 | cusA | Copper/silver RND |
| | | | | | permease CusA |
| K-12 | P33941 | −4.25 | 5.67E−05 | ggt | Gamma- |
| | | | | | glutamyltranspeptidase |
| | | | | | Ggt |
| K-12 | P38105 | −4.82 | 1.90E−03 | otsB | Trehalose-6-phosphate |
| | | | | | phosphatase OtsB |
| K-12 | POC058 | −4.89* | 7.41E−04 | acrB | Multidrug RND |
| | | | | | permease AcrB |
| K-12 | POA7B8 | −4.91 | 5.11E−05 | gcd | Quinoprotein glucose |
| | | | | | dehydrogenase Qcd |
| K-12 | POC054 | −5.16 | 8.20E−04 | lamB | Maltose outer |
| | | | | | membrane channel |
| | | | | | LamB |
| K-12 | P15031 | −5.40 | 6.01E−04 | tnaA | Tryptophanase TnaA |
| K-12 | P31224 | −5.93 | 2.21E−05 | puuE | 4-aminobutyrate |
| | | | | | aminotransferase PuuE |

*AcrB fold difference was calculated through imputation using a normal distribution

TABLE 9
Efflux peptides detected in LC-MS/MS comparative proteomics from
cultures grown in Lysogeny broth and minimal M9 medium with a glucose
carbon source, in the absence of antibiotic selection. Peptides were
considered significant if they were identified in at least three biological
replicates. Additionally, a minimum of two peptides detected for each
efflux pump was required.

| Efflux | |
|---|---|
| Pump | Peptides Observed in K-12 |
| AcrB | AADGQMVPFSAFSSSR (SEQ ID NO: 256), |
| | AQALGVSINDINTTLGAAWGGSYVNDFIDR (SEQ ID NO: 257), |
| | AQNAQVAAGQLGGTPPVK (SEQ ID NO: 258), DWADRPGEENKVEAITMR |
| | (SEQ ID NO: 259), FQLTPVDVITAIK (SEQ ID NO: 260), |
| | GFFGWENR (SEQ ID NO: 261), GLIEATLDAVR (SEQ ID NO: |
| | 262), GQNTGIAFVSLK (SEQ ID NO: 263), |
| | HPDMLTSVRPNGLEDTPQFK (SEQ ID NO: 264), IVYPYDTTPFVK |
| | (SEQ ID NO: 265), IWMNPNELNK (SEQ ID NO: 266), |
| | LATGANALDTAAAIR (SEQ ID NO: 267), LPTGVGYDWTGMSYQER |
| | (SEQ ID NO: 268), LQLAMPLLPQEVQQQGVSVEK (SEQ ID NO: |
| | 269), MEPFFPSGLK (SEQ ID NO: 270), MLPDDIGDWYVR (SEQ ID |
| | NO: 271), NAILIVEFAK (SEQ ID NO: 272), |
| | NNVESVFAVNGFGFAGR (SEQ ID NO: 273), STGEAMELMEQLASK |
| | (SEQ ID NO: 274), TSGVGDVQLFGSQYAMR (SEQ ID NO: 275), |
| | VEAITMR (SEQ ID NO: 276), VLNEVTHYYLTK (SEQ ID NO: |
| | 277), VMAEEGLPPK (SEQ ID NO: 278), VYVMSEAK (SEQ ID NO: |
| | 279), WEYGSPR (SEQ ID NO: 280), YNGLPSMEILGQAAPGK (SEQ |
| | ID NO: 281) |
| CusA | ASGYLQTLDDENHIVLK (SEQ ID NO: 282), DRDMVSVVHDLQK (SEQ |
| | ID NO: 283), HDLADLR (SEQ ID NO: 284), IIEELDNTVR (SEQ |
| | ID NO: 285), LAQYGISLAEVK (SEQ ID NO: 286), |
| | LDEALYHGAVLR (SEQ ID NO: 287), LFGPLAFTK (SEQ ID NO: |
| | 288), LPGLANLWVPPIR (SEQ ID NO: 289), QLPILTPMK (SEQ ID |
| | NO: 290), QQITLADVADIK (SEQ ID NO: 291), SLQDWELK (SEQ |
| | ID NO: 292), TIPDVAEVASVGGVVK (SEQ ID NO: 293), |
| | TVPGVASALAER (SEQ ID NO: 294), VLEYLNQVQGK (SEQ ID NO: |
| | 295) |
| MdtK | GTAKPDPAVMK (SEQ ID NO: 296), LPSAIILQR (SEQ ID NO: |
| | 297) |
| Yojl | AEFPRPQAFPNWQTLELR (SEQ ID NO: 298), |
| | EFYQVLLPLMQEMGK (SEQ ID NO: 299), ILDTHVER (SEQ ID NO: |
| | 300), LFSAVFTDVWLFDQLLGPEGKPANPQLVEK (SEQ ID NO: 301) |

TABLE 10
Susceptibility of ΔtolC and EKO-35 +/− the pore to a diverse
panel of antimicrobial agents. Strains were assessed in technical duplicate
and instances where the MIC value differed (4-fold or greater) between
EKO-35 and ΔtolC are bolded. Values with a 4-fold or greater change
in MIC are in bold font to indicate increased susceptibility in EKO-35
compared to ΔtolC. STDC: Sodium taurodeoxycholate.

| | Minimum inhibitory concentration (MIC) (μg/mL) | | | | | |
|---|---|---|---|---|---|---|
| | | | | Pore | | |
| Compound | K-12 | ΔtolC | EKO-35 | K-12 | ΔtolC | EKO-35 |
| Rifampicin | 12.5 | 6.25 | 6.25 | 0.781 | 0.391 | 0.391 |
| Vancomycin | 200 | 200 | 200 | 3.125 | 6.25 | 6.25 |
| Fosfomycin | 6.25 | 6.25 | 3.125 | 3.125 | 3.125 | 0.781 |
| Ampicillin | 100 | 25 | 25 | 12.5 | 1.563 | 1.563 |
| Oxacillin | 160 | 0.625 | 0.625 | 40 | 0.313 | 0.313 |
| Chloramphenicol | 6.5 | 1.563 | 0.781 | 3.125 | 0.781 | 0.781 |
| Puromycin | 50 | 3.125 | 1.563 | 50 | 1.563 | 0.781 |
| Azithromycin | 6.25 | 0.781 | 0.781 | 0.391 | 0.049 | 0.049 |
| Erythromycin | 100 | 3.125 | 3.125 | 6.25 | 0.195 | 0.195 |
| Spectinomycin | 25 | 6.25 | 25 | 12.5 | 6.25 | 12.5 |
| Tetracycline | 1.563 | 0.391 | 0.195 | 0.781 | 0.391 | 0.195 |
| Linezolid | 500 | 7.813 | 7.813 | 125 | 3.906 | 3.906 |
| Kanamycin | 3.125 | 1.563 | 3.125 | 3.125 | 1.563 | 1.563 |
| Streptomycin | 6.25 | 3.125 | 3.125 | 12.5 | 1.563 | 3.125 |
| Minocycline | 0.781 | 0.098 | 0.049 | 0.781 | 0.098 | 0.049 |
| Fusidic acid | 400 | 3.125 | 3.125 | 100 | 0.391 | 0.391 |
| Ciprofloxacin | 0.010 | 0.005 | 0.005 | 0.005 | 0.002 | 0.002 |
| Norfloxacin | 0.078 | 0.020 | 0.020 | 0.078 | 0.010 | 0.010 |
| Nalidixic acid | 10 | 1.25 | 1.25 | 5 | 1.25 | 1.25 |
| Novobiocin | 200 | 0.781 | 3.125 | 12.5 | 0.391 | 0.781 |
| Trimethoprim | 0.391 | 0.098 | 0.195 | 0.391 | 0.049 | 0.195 |
| Doxorubicin | 200 | 1.563 | 1.563 | 50 | 0.781 | 0.781 |
| Daunorubicin | 200 | 1.563 | 3.125 | 100 | 0.781 | 0.781 |
| Ethidium | 100 | 3.125 | 0.195 | 100 | 3.125 | 0.098 |
| bromide | | | | | | |
| Bicyclomycin | 200 | 200 | 200 | 200 | 200 | 200 |
| Sulfathiazole | 5 | 5 | 10 | 5 | 2.5 | 5 |
| Acriflavine | 50 | 3.125 | 0.098 | 50 | 3.125 | 0.098 |
| SDS | 1000 | 15.625 | 31.25 | 1000 | 15.625 | 31.25 |
| Benzalkonium | 12.5 | 0.391 | 0.391 | 6.25 | 0.391 | 0.391 |
| chloride | | | | | | |
| Deoxycholate | 1500 | 187.5 | 375 | 1500 | 46.875 | 187.5 |
| STDC | 1000 | 250 | 500 | 1000 | 250 | 250 |
| Chlorhexidine | 0.781 | 0.391 | 0.391 | 0.781 | 0.391 | 0.391 |
| CCCP | 25 | 0.781 | 12.5 | 12.5 | 0.391 | 6.25 |
| Spermine | 2000 | 2000 | 2000 | 2000 | 2000 | 2000 |
| Compound 1 | 320 | 5 | 320 | 320 | 10 | 320 |
| Compound 2 | 320 | 1.25 | 320 | 320 | 1.25 | 320 |
| Compound 3 | 320 | 2.5 | 320 | 320 | 1.25 | 320 |
| Compound 4 | 320 | 10 | 20 | 320 | 1.25 | 2.5 |
| Compound 5 | 320 | 10 | 20 | 320 | 2.5 | 20 |
| Compound 6 | 320 | 0.625 | 320 | 320 | 0.625 | 320 |
| Compound 7 | 320 | 0.313 | 320 | 320 | 0.313 | 320 |
| Compound 8 | 640 | 1.25 | 320 | 160 | 1.25 | 80 |
| Compound 10 | 160 | 10 | 160 | 160 | 5 | 10 |
| Compound 11 | 320 | 0.156 | 0.078 | 80 | 0.156 | 0.078 |
| Compound 12 | 320 | 1.25 | 320 | 320 | 0.625 | 160 |
| Compound 13 | 320 | 1.25 | 40 | 320 | 1.25 | 5 |
| Compound 14 | 320 | 2.5 | 320 | 320 | 1.25 | 320 |
| Compound 15 | 320 | 1.25 | 320 | 320 | 0.625 | 320 |
| Compound 16 | 320 | 10 | 10 | 160 | 5 | 5 |
| Compound 17 | 320 | 1.25 | 320 | 320 | 0.313 | 320 |
| Compound 18 | 320 | 5 | 5 | 320 | 1.25 | 1.25 |
| Compound 19 | 320 | 2.5 | 320 | 320 | 0.625 | 320 |

TABLE 11A
Assessing the susceptibility of EKO-35 harboring ASKA
plasmids expressing rspA, tufA, pitA, wcaC, gyrB, and yjfC.
Strains were assessed in technical duplicate and instances
where the MIC value differed >2-fold between EKO-35 and
EKO-35 harboring ASKA plasmids are bolded. Gene expression
was induced with 0.1 mM IPTG. Control strains harbored
empty pCA24N. ND: not determined. NV: not viable.
Susceptibility testing was performed both in the presence
and absence of plasmid selection (25 μg/mL and 4 μg/mL
chloramphenicol for the wild-type E. coli
and EKO-35 strains, respectively).

| | Strain (pCA24N) | | | | | |
|---|---|---|---|---|---|---|
| | Benzalkonium | | Novobiocin | | Trimethoprim | |
| | chloride (μg/mL) | | (μg/mL) | | (μg/mL) | |
| Chlor | − | + | − | + | − | + |
| K-12 | 25 | 25 | 400 | 200 | 0.781 | 0.781 |
| K-12 gyrB | ND | ND | 400 | 100 | ND | ND |
| K-12 | ND | ND | ND | ND | 1.56 | 0.195 |
| wcaC | | | | | | |
| ΔtolC | 1.56 | 0.781 | 3.13 | 1.56 | 0.195 | 1.56 |
| ΔtolC | ND | ND | 12.5 | 12.5 | ND | ND |
| gyrB | | | | | | |
| ΔtolC | ND | ND | ND | ND | 0.195 | 0.195 |
| wcaC | | | | | | |
| EKO-35 | 0.781 | 0.781 | 3.13 | 3.13 | 0.391 | 0.391 |
| EKO-35 | 0.781 | 0.781 | 12.5 | 25 | 0.391 | 0.391 |
| gyrB | | | | | | |
| EKO-35 | 0.781 | 0.391 | 1.56 | 1.56 | 0.781 | 0.781 |
| wcaC | | | | | | |
| EKO-35 | 0.781 | 0.781 | 3.13 | 1.56 | 0.391 | 0.391 |
| rspA | | | | | | |
| EKO-35 | 0.781 | NV | 1.56 | NV | 0.391 | NV |
| pitA | | | | | | |
| EKO-35 | 0.781 | 0.781 | 1.56 | 3.13 | 0.391 | 0.391 |
| tufA | | | | | | |
| EKO-35 | 0.781 | 0.781 | 3.13 | 3.13 | 0.391 | 0.391 |
| yjfC | | | | | | |

TABLE 11B
Assessing the susceptibility of EKO-35 harboring ASKA
plasmids expressing rspA, tufA, pitA, wcaC, gyrB, and yjfC.
Strains were assessed in technical duplicate and instances
where the MIC value differed >2-fold between EKO-35 and
EKO-35 harboring ASKA plasmids are bolded. Gene expression
was induced with 0.1 mM IPTG. Control strains harbored
empty pCA24N. ND: not determined. NV: not viable.
Susceptibility testing was performed both in the presence
and absence of plasmid selection (25 μg/mL and 4 μg/mL
chloramphenicol for the wild-type E. coli
and EKO-35 strains, respectively).

| Strain (pCA24N) | | |
|---|---|---|
| Synthetic 2 | Synthetic 14 | Synthetic 19 |
| (μg/mL) | (μg/mL) | (μg/mL) |

| Chlor | − | + | − | + | − | + |
|---|---|---|---|---|---|---|
| K-12 | >5 | >5 | >5 | >5 | >5 | >5 |
| K-12 | ND | ND | ND | ND | ND | ND |
| gyrB | | | | | | |
| K-12 | ND | ND | ND | ND | ND | ND |
| wcaC | | | | | | |
| ΔtolC | 1.25 | 1.25 | 1.25 | 1.25 | 2.5 | 2.5 |
| ΔtolC | ND | ND | ND | ND | ND | ND |
| gyrB | | | | | | |
| ΔtolC | ND | ND | ND | ND | ND | ND |
| wcaC | | | | | | |
| EKO-35 | >5 | >5 | >5 | >5 | >5 | >5 |
| EKO-35 | >5 | >5 | >5 | >5 | >5 | >5 |
| gyrB | | | | | | |
| EKO-35 | >5 | >5 | >5 | >5 | >5 | >5 |
| wcaC | | | | | | |
| EKO-35 | >5 | >5 | >5 | >5 | >5 | >5 |
| rspA | | | | | | |
| EKO-35 | >5 | NV | >5 | NV | >5 | NV |
| pitA | | | | | | |
| EKO-35 | >5 | >5 | >5 | >5 | >5 | >5 |
| tufA | | | | | | |
| EKO-35 | >5 | >5 | >5 | >5 | >5 | >5 |
| yjfC | | | | | | |

TABLE 12
Efflux genes and reported substrates.

| Gene | Known Substrates |
|---|---|
| acrB | Ampicillin, oxacillin, meropenem, chloramphenicol, puromycin, |
| | erythromycin, ciprofloxacin, norfloxacin, nalidixic acid, linezolid, fusidic |
| | acid, tetracycline, novobiocin, trimethoprim, acriflavine, ethidium |
| | bromide, SDS, deoxycholate, sodium cholate, rifampin |
| acrD | Kanamycin, amikacin, gentamicin, tobramycin, neomycin, novobiocin, |
| | SDS, deoxycholate, oxacillin, carbenicillin puromycin |
| acrF | Chloramphenicol, erythromycin, nalidixic acid, tetracycline, acriflavine, |
| | trimethoprim, doxorubicin, novobiocin, norfloxacin, SDS, deoxycholate, |
| | benzalkonium chloride, oxacillin |
| emrB | CCCP, SDS, deoxycholate, TSA, nalidixate |
| emrY | Deoxycholate |
| mdtF | Erythromycin, telithromycin, azithromycin, ethidium bromide, |
| | doxorubicin, crystal violet, TTP, SDS, novobiocin, ciprofloxacin, |
| | deoxycholate, cholate, taurocholate, oxacillin |
| mdtBC | Norfloxacin, nalidixic acid, novobiocin, SDS, deoxycholate, fosfomycin, |
| | benzalkonium chloride |
| macB | Erythromycin, azithromycin, additional macrolides |
| emrE | Erythromycin, acriflavine, ethidium bromide, benzalkonium chloride, |
| | tetracycline, TTP, crystal violet, streptomycin, tobramycin (and additional |
| | aminoglycosides), sulfadiazine |
| mdtK | Chloramphenicol, ciprofloxacin, norfloxacin, trimethoprim, acriflavine, |
| | ethidium bromide, doxorubicin, benzalkonium chloride, fosfomycin, |
| | novobiocin, |
| mexCD | Tetracycline, chloramphenicol, novobiocin, macrolides, quinolones, |
| | meropenem, acriflavine, ethidium bromide |

TABLE 13A
Minimum inhibitory concentrations (MICs) of various compounds against the wild-type K-12,
ΔtolC, EKO-35, and the efflux-integrated EKO-35 strains, which were used to calculate
fold-change. Strains were assessed in technical duplicate and values that showed a 4-fold
or greater increase from the EKO-35 MIC are bolded. STDC: Sodium taurodeoxycholate.

| | Minimum Inhibitory Concentration (ug/mL) | | | | | | |
|---|---|---|---|---|---|---|---|
| | EKO-35 araC::gene | | | | | | |
| Compound | K-12 | ΔtolC | EKO-35 | acrB | acrD | acrEF | mdtEF |
| Rifampicin | 12.5 | 6.25 | 6.25 | 6.25 | 6.25 | 6.25 | 6.25 |
| Vancomycin | 200 | 200 | 200 | 200 | 200 | 200 | 200 |
| Fosfomycin | 6.25 | 6.25 | 3.125 | 1.563 | 1.563 | 1.563 | 1.563 |
| Ampicillin | 100 | 25 | 25 | 100 | 100 | 50 | 25 |
| Oxacillin | 160 | 0.625 | 0.625 | 160 | 160 | 160 | 20 |
| Chloramphenicol | 6.25 | 1.563 | 0.781 | 6.25 | 1.563 | 1.563 | 0.781 |
| Puromycin | 50 | 3.125 | 1.563 | 100 | 1.563 | 6.25 | 1.563 |
| Azithromycin | 6.25 | 0.781 | 0.781 | 12.5 | 0.781 | 6.25 | 6.25 |
| Erythromycin | 100 | 3.125 | 3.125 | 100 | 3.125 | 50 | 50 |
| Spectinomycin | 25 | 6.25 | 25 | 25 | 25 | 25 | 25 |
| Tetracycline | 1.563 | 0.391 | 0.195 | 0.781 | 0.195 | 0.195 | 0.195 |
| Linezolid | 500 | 7.813 | 7.813 | 250 | 7.813 | 15.625 | 3.906 |
| Kanamycin | 3.125 | 1.563 | 3.125 | 3.125 | 3.125 | 3.125 | 3.125 |
| Streptomycin | 6.25 | 3.125 | 3.125 | 6.25 | 6.25 | 3.125 | 6.25 |
| Minocycline | 0.781 | 0.098 | 0.049 | 0.391 | 0.098 | 0.098 | 0.049 |
| Fusidic acid | 400 | 3.125 | 3.125 | 400 | 100 | 50 | 50 |
| Ciprofloxacin | 0.010 | 0.005 | 0.005 | 0.020 | 0.005 | 0.020 | 0.005 |
| Norfloxacin | 0.078 | 0.020 | 0.020 | 0.078 | 0.020 | 0.078 | 0.020 |
| Nalidixic acid | 10 | 1.25 | 1.25 | 10 | 2.5 | 5 | 1.25 |
| Novobiocin | 200 | 0.781 | 3.125 | 400 | 200 | 400 | 50 |
| Trimethoprim | 0.391 | 0.098 | 0.195 | 1.563 | 0.391 | 0.781 | 0.391 |
| Doxorubicin | 200 | 1.563 | 1.563 | 200 | 3.125 | 100 | 100 |
| Daunorubicin | 200 | 1.563 | 3.125 | 200 | 6.25 | 200 | 200 |
| Ethidium bromide | 100 | 3.125 | 0.195 | 12.5 | 0.391 | 3.125 | 1.563 |
| Bicyclomycin | 200 | 200 | 200 | 200 | 200 | 200 | 200 |
| Sulfathiazole | 5 | 5 | 10 | 10 | 10 | 10 | 10 |
| Acriflavine | 50 | 3.125 | 0.098 | 3.125 | 0.195 | 0.781 | 0.195 |
| SDS | 1000 | 15.625 | 31.25 | 1000 | 1000 | 1000 | 1000 |
| Benzalkonium | 12.5 | 0.391 | 0.391 | 12.5 | 0.391 | 1.563 | 1.563 |
| chloride | | | | | | | |
| Deoxycholate | 1500 | 187.5 | 375 | 1500 | 1500 | 1500 | 1500 |
| STDC | 1000 | 250 | 500 | 1000 | 1000 | 1000 | 1000 |
| Chlorhexidine | 0.781 | 0.391 | 0.391 | 0.391 | 0.391 | 0.391 | 0.391 |
| CCCP | 25 | 0.781 | 12.5 | 12.5 | 6.25 | 12.5 | 12.5 |
| Spermine | 2000 | 2000 | 2000 | 2000 | 2000 | 2000 | 2000 |
| Compound 1 | 320 | 5 | 320 | 320 | 320 | 320 | 320 |
| Compound 2 | 320 | 1.25 | 320 | 320 | 320 | 320 | 320 |
| Compound 3 | 320 | 2.5 | 320 | 320 | 320 | 320 | 320 |
| Compound 4 | 320 | 10 | 20 | 320 | 320 | 320 | 320 |
| Compound 5 | 320 | 10 | 20 | 320 | 40 | 320 | 320 |
| Compound 6 | 320 | 0.625 | 320 | 320 | 320 | 320 | 320 |
| Compound 7 | 320 | 0.313 | 320 | 320 | 320 | 320 | 320 |
| Compound 8 | 640 | 1.25 | 320 | 640 | 160 | 320 | 320 |
| Compound 10 | 160 | 10 | 160 | 160 | 160 | 160 | 160 |
| Compound 11 | 320 | 0.156 | 0.078 | 320 | 0.625 | 320 | 10 |
| Compound 12 | 320 | 1.25 | 320 | 320 | 320 | 320 | 320 |
| Compound 13 | 320 | 1.25 | 40 | 320 | 320 | 320 | 320 |
| Compound 14 | 320 | 2.5 | 320 | 320 | 320 | 320 | 320 |
| Compound 15 | 320 | 1.25 | 320 | 320 | 320 | 320 | 320 |
| Compound 16 | 320 | 10 | 10 | 320 | 10 | 320 | 160 |
| Compound 17 | 320 | 1.25 | 320 | 320 | 320 | 320 | 320 |
| Compound 18 | 320 | 5 | 5 | 320 | 320 | 320 | 320 |
| Compound 19 | 320 | 2.5 | 320 | 320 | 320 | 320 | 320 |

TABLE 13B
Minimum inhibitory concentrations (MICs) of various compounds against
the wild-type K-12, ΔtolC, EKO-35, and the efflux-integrated EKO-35
strains, which were used to calculate fold-change. Strains were assessed
in technical duplicate and values that showed a 4-fold or greater increase
from the EKO-35 MIC are bolded. STDC: Sodium taurodeoxycholate.

| | Minimum Inhibitory Concentration (ug/mL) | | | | | |
|---|---|---|---|---|---|---|
| | EKO-35 araC::gene | | | | | |
| Compound | mdtBC | macAB | emrKY | emrAB | mexCD | acrB_{D408A} |
| Rifampicin | 6.25 | 6.25 | 6.25 | 6.25 | 3.125 | 3.125 |
| Vancomycin | 200 | 200 | 200 | 200 | 200 | 200 |
| Fosfomycin | 1.563 | 3.125 | 1.563 | 3.125 | 1.563 | 3.125 |
| Ampicillin | 25 | 12.5 | 25 | 25 | 25 | 25 |
| Oxacillin | 0.625 | 0.625 | 0.625 | 1.25 | 20 | 1.25 |
| Chloramphenicol | 0.781 | 0.781 | 0.391 | 0.781 | 0.781 | 0.781 |
| Puromycin | 1.563 | 1.563 | 1.563 | 1.563 | 6.25 | 1.563 |
| Azithromycin | 0.781 | 3.125 | 0.391 | 0.781 | 3.125 | 0.781 |
| Erythromycin | 3.125 | 12.5 | 3.125 | 3.125 | 25 | 3.125 |
| Spectinomycin | 25 | 25 | 25 | 25 | 25 | 25 |
| Tetracycline | 0.195 | 0.195 | 0.195 | 0.195 | 0.195 | 0.195 |
| Linezolid | 3.906 | 3.906 | 3.906 | 3.906 | 15.625 | 7.813 |
| Kanamycin | 3.125 | 3.125 | 1.563 | 3.125 | 1.563 | 1.563 |
| Streptomycin | 6.25 | 3.125 | 3.125 | 3.125 | 3.125 | 3.125 |
| Minocycline | 0.049 | 0.049 | 0.049 | 0.049 | 0.049 | 0.049 |
| Fusidic acid | 6.25 | 3.125 | 3.125 | 6.25 | 12.5 | 3.125 |
| Ciprofloxacin | 0.005 | 0.005 | 0.005 | 0.005 | 0.010 | 0.005 |
| Norfloxacin | 0.020 | 0.020 | 0.010 | 0.020 | 0.039 | 0.020 |
| Nalidixic acid | 1.25 | 1.25 | 1.25 | 10 | 2.5 | 1.25 |
| Novobiocin | 12.5 | 1.563 | 3.125 | 25 | 25 | 3.125 |
| Trimethoprim | 0.195 | 0.195 | 0.195 | 0.195 | 0.391 | 0.098 |
| Doxorubicin | 1.563 | 1.563 | 1.563 | 1.563 | 25 | 1.563 |
| Daunorubicin | 1.563 | 6.25 | 3.125 | 3.125 | 100 | 3.125 |
| Ethidium | 0.195 | 0.195 | 0.195 | 0.195 | 1.563 | 0.391 |
| bromide | | | | | | |
| Bicyclomycin | 200 | 200 | 200 | 200 | 200 | 200 |
| Sulfathiazole | 10 | 5 | 10 | 10 | 10 | 10 |
| Acriflavine | 0.098 | 0.098 | 0.098 | 0.098 | 0.781 | 0.098 |
| SDS | 62.5 | 31.25 | 62.5 | 125 | 1000 | 62.5 |
| Benzalkonium | 0.391 | 0.391 | 0.391 | 0.391 | 0.781 | 0.391 |
| chloride | | | | | | |
| Deoxycholate | 1500 | 187.5 | 375 | 1500 | 1500 | 375 |
| STDC | 1000 | 250 | 500 | 1000 | 1000 | 1000 |
| Chlorhexidine | 0.391 | 0.391 | 0.391 | 0.391 | 0.391 | 0.391 |
| CCCP | 12.5 | 12.5 | 12.5 | 50 | 12.5 | 12.5 |
| Spermine | 2000 | 2000 | 2000 | 2000 | 2000 | 2000 |
| Compound 1 | 320 | 320 | 320 | 320 | 320 | 320 |
| Compound 2 | 320 | 320 | 320 | 320 | 320 | 320 |
| Compound 3 | 320 | 320 | 320 | 320 | 320 | 320 |
| Compound 4 | 20 | 20 | 20 | 320 | 320 | 20 |
| Compound 5 | 10 | 20 | 20 | 320 | 320 | 20 |
| Compound 6 | 320 | 320 | 320 | 320 | 320 | 320 |
| Compound 7 | 320 | 320 | 320 | 320 | 320 | 320 |
| Compound 8 | 320 | 320 | 320 | 320 | 320 | 320 |
| Compound 10 | 160 | 160 | 160 | 160 | 160 | 160 |
| Compound 11 | 0.078 | 0.078 | 0.078 | 40 | 1.25 | 0.078 |
| Compound 12 | 320 | 320 | 320 | 320 | 320 | 320 |
| Compound 13 | 40 | 40 | 40 | 320 | 320 | 40 |
| Compound 14 | 320 | 320 | 320 | 320 | 320 | 320 |
| Compound 15 | 320 | 320 | 320 | 320 | 320 | 320 |
| Compound 16 | 5 | 10 | 5 | 160 | 160 | 10 |
| Compound 17 | 320 | 320 | 320 | 320 | 320 | 320 |
| Compound 18 | 10 | 2.5 | 2.5 | 320 | 320 | 5 |
| Compound 19 | 320 | 320 | 320 | 320 | 320 | 320 |

TABLE 14A
Minimum inhibitory concentrations (MICs) of various compounds against the wild-type (WT)-Pore,
ΔtolC-Pore, EKO-35-Pore, and the efflux-integrated EKO-35-Pore strains, which were used
to calculate fold-change. Strains were assessed in technical duplicate and values that showed
a 4-fold or greater increase from the EKO-35 MIC are bolded. STDC: Sodium taurodeoxycholate.

| | Minimum inhibitory concentration (μg/mL) | | | | | | |
|---|---|---|---|---|---|---|---|
| | EKO-35 araC::gene Pore | | | | | | |
| Compound | K-12 | ΔtolC | EKO-35 | acrB | acrD | acrEF | mdtEF |
| Rifampicin | 0.781 | 0.391 | 0.391 | 1.563 | 0.391 | 0.391 | 0.391 |
| Vancomycin | 3.125 | 6.25 | 6.25 | 3.125 | 3.125 | 3.125 | 6.25 |
| Fosfomycin | 3.125 | 3.125 | 0.781 | 0.781 | 0.781 | 1.563 | 0.781 |
| Ampicillin | | 1.563 | 1.563 | 12.5 | 25 | 3.125 | 1.563 |
| Oxacillin | 40 | 0.313 | 0.313 | 20 | 20 | 5 | 1.25 |
| Chloramphenicol | 3.125 | 0.781 | 0.781 | 3.125 | 0.781 | 0.781 | 0.781 |
| Puromycin | 50 | 1.563 | 0.781 | 50 | 0.781 | 3.125 | 1.563 |
| Azithromycin | 0.391 | 0.049 | 0.049 | 0.195 | 0.024 | 0.195 | 0.195 |
| Erythromycin | 6.25 | 0.195 | 0.195 | 6.25 | 0.195 | 1.563 | 1.563 |
| Spectinomycin | 12.5 | 6.25 | 12.5 | 25 | 25 | 12.5 | 12.5 |
| Tetracycline | 0.781 | 0.391 | 0.195 | 0.391 | 0.195 | 0.195 | 0.195 |
| Linezolid | 125 | 3.906 | 3.906 | 62.5 | 7.813 | 7.813 | 7.813 |
| Kanamycin | 3.125 | 1.563 | 1.563 | 3.125 | 1.563 | 1.563 | 1.563 |
| Streptomycin | 12.5 | 1.563 | 3.125 | 6.25 | 3.125 | 3.125 | 3.125 |
| Minocycline | 0.781 | 0.098 | 0.049 | 0.391 | 0.098 | 0.098 | 0.098 |
| Fusidic acid | 100 | 0.391 | 0.391 | 100 | 12.5 | 12.5 | 3.125 |
| Ciprofloxacin | 0.005 | 0.002 | 0.002 | 0.009 | 0.002 | 0.010 | 0.002 |
| Norfloxacin | 0.078 | 0.010 | 0.010 | 0.078 | 0.020 | 0.039 | 0.020 |
| Nalidixic acid | 5 | 1.25 | 1.25 | 10 | 1.25 | 2.5 | 1.25 |
| Novobiocin | 12.5 | 0.391 | 0.781 | 400 | 25 | 25 | 12.5 |
| Trimethoprim | 0.391 | 0.049 | 0.195 | 0.781 | 0.195 | 0.195 | 0.391 |
| Doxorubicin | 50 | 0.781 | 0.781 | 50 | 0.781 | 12.5 | 25 |
| Daunorubicin | 100 | 0.781 | 0.781 | 100 | 1.563 | 25 | 50 |
| Ethidium bromide | 100 | 3.125 | 0.098 | 6.25 | 0.195 | 1.563 | 0.781 |
| Bicyclomycin | 200 | 200 | 200 | 200 | 200 | 200 | 200 |
| Sulfathiazole | 5 | 2.5 | 5 | 10 | 5 | 5 | 10 |
| Acriflavine | 50 | 3.125 | 0.098 | 1.563 | 0.195 | 0.781 | 0.195 |
| SDS | 1000 | 15.625 | 31.25 | 1000 | 1000 | 1000 | 1000 |
| Benzalkonium | 6.25 | 0.391 | 0.391 | 3.125 | 0.391 | 0.781 | 1.563 |
| chloride | | | | | | | |
| Deoxycholate | 1500 | 46.875 | 187.5 | 1500 | 1500 | 1500 | 1500 |
| STDC | 1000 | 250 | 250 | 1000 | 1000 | 1000 | 1000 |
| Chlorhexidine | 0.781 | 0.391 | 0.391 | 0.391 | 0.391 | 0.391 | 0.391 |
| CCCP | 12.5 | 0.391 | 6.25 | 6.25 | 6.25 | 3.125 | 6.25 |
| Spermine | 2000 | 2000 | 2000 | 2000 | 2000 | 2000 | 2000 |
| Compound 1 | 320 | 10 | 320 | 320 | 320 | 320 | 320 |
| Compound 2 | 320 | 1.25 | 320 | 320 | 320 | 320 | 320 |
| Compound 3 | 320 | 1.25 | 320 | 320 | 320 | 320 | 320 |
| Compound 4 | 320 | 1.25 | 2.5 | 320 | 10 | 320 | 320 |
| Compound 5 | 320 | 2.5 | 20 | 320 | 10 | 320 | 320 |
| Compound 6 | 320 | 0.625 | 320 | 320 | 320 | 320 | 320 |
| Compound 7 | 320 | 0.313 | 320 | 320 | 320 | 320 | 320 |
| Compound 8 | 160 | 1.25 | 80 | 160 | 40 | 40 | 80 |
| Compound 10 | 160 | 5 | 10 | 160 | 160 | 160 | 160 |
| Compound 11 | 80 | 0.156 | 0.078 | 80 | 0.313 | 80 | 5 |
| Compound 12 | 320 | 0.625 | 160 | 320 | 160 | 320 | 320 |
| Compound 13 | 320 | 1.25 | 5 | 320 | 10 | 20 | 40 |
| Compound 14 | 320 | 1.25 | 320 | 320 | 320 | 320 | 320 |
| Compound 15 | 320 | 0.625 | 320 | 320 | 320 | 320 | 320 |
| Compound 16 | 160 | 5 | 5 | 160 | 5 | 80 | 80 |
| Compound 17 | 320 | 0.313 | 320 | 320 | 320 | 320 | 320 |
| Compound 18 | 320 | 1.25 | 1.25 | 320 | 10 | 320 | 320 |
| Compound 19 | 320 | 0.625 | 320 | 320 | 320 | 320 | 320 |

TABLE 14B
Minimum inhibitory concentrations (MICs) of various compounds against the
wild-type (WT)-Pore, ΔtolC-Pore, EKO-35-Pore, and the efflux-integrated
EKO-35-Pore strains, which were used to calculate fold-change. Strains were
assessed in technical duplicate and values that showed a 4-fold or greater
increase from the EKO-35 MIC are bolded. STDC: Sodium taurodeoxycholate.

| | Minimum inhibitory concentration (μg/mL) | | | | | |
|---|---|---|---|---|---|---|
| | EKO-35 araC::gene Pore | | | | | |
| Compound | mdtBC | macAB | emrKY | emrAB | mexCD | acrB_{D408A} |
| Rifampicin | 0.781 | 0.391 | 0.391 | 0.195 | 0.391 | 0.195 |
| Vancomycin | 1.563 | 6.25 | 3.125 | 3.125 | 6.25 | 6.25 |
| Fosfomycin | 0.781 | 0.781 | 0.781 | 1.563 | 1.563 | 0.781 |
| Ampicillin | 0.781 | 1.563 | 3.125 | 0.781 | 1.563 | 0.781 |
| Oxacillin | 0.313 | 0.313 | 0.313 | 0.313 | 2.5 | 0.156 |
| Chloramphenicol | 0.781 | 0.781 | 0.391 | 0.781 | 0.781 | 0.781 |
| Puromycin | 0.781 | 0.781 | 1.563 | 0.781 | 1.563 | 0.781 |
| Azithromycin | 0.049 | 0.098 | 0.024 | 0.049 | 0.098 | 0.098 |
| Erythromycin | 0.195 | 0.781 | 0.195 | 0.195 | 1.563 | 0.098 |
| Spectinomycin | 12.5 | 12.5 | 12.5 | 12.5 | 12.5 | 12.5 |
| Tetracycline | 0.195 | 0.195 | 0.195 | 0.195 | 0.195 | 0.195 |
| Linezolid | 3.906 | 3.906 | 3.906 | 7.813 | 7.813 | 3.906 |
| Kanamycin | 1.563 | 3.125 | 1.563 | 1.563 | 1.563 | 0.781 |
| Streptomycin | 3.125 | 3.125 | 3.125 | 3.125 | 3.125 | 1.563 |
| Minocycline | 0.049 | 0.049 | 0.049 | 0.049 | 0.049 | 0.049 |
| Fusidic acid | 0.391 | 0.391 | 0.391 | 1.563 | 1.563 | 0.391 |
| Ciprofloxacin | 0.002 | 0.002 | 0.002 | 0.005 | 0.005 | 0.002 |
| Norfloxacin | 0.020 | 0.020 | 0.010 | 0.020 | 0.039 | 0.020 |
| Nalidixic acid | 1.25 | 1.25 | 1.25 | 10 | 2.5 | 1.25 |
| Novobiocin | 3.125 | 0.781 | 0.781 | 6.25 | 3.125 | 0.391 |
| Trimethoprim | 0.195 | 0.195 | 0.391 | 0.391 | 0.195 | 0.195 |
| Doxorubicin | 3.125 | 0.781 | 0.781 | 0.781 | 3.125 | 0.781 |
| Daunorubicin | 3.125 | 1.563 | 0.781 | 1.563 | 12.5 | 0.781 |
| Ethidium bromide | 0.098 | 0.098 | 0.098 | 0.098 | 0.781 | 0.098 |
| Bicyclomycin | 200 | 200 | 200 | 200 | 200 | 200 |
| Sulfathiazole | 5 | 10 | 5 | 10 | 5 | 1.25 |
| Acriflavine | 0.098 | 0.195 | 0.098 | 0.195 | 0.391 | 0.098 |
| SDS | 31.25 | 31.25 | 31.25 | 125 | 125 | 31.25 |
| Benzalkonium | 0.195 | 0.391 | 0.195 | 0.391 | 0.391 | 0.391 |
| chloride | | | | | | |
| Deoxycholate | 750 | 187.5 | 187.5 | 750 | 375 | 93.75 |
| STDC | 1000 | 250 | 250 | 500 | 1000 | 250 |
| Chlorhexidine | 0.391 | 0.391 | 0.391 | 0.391 | 0.391 | 0.391 |
| CCCP | 12.5 | 6.25 | 6.25 | 12.5 | 6.25 | 6.25 |
| Spermine | 2000 | 2000 | 2000 | 2000 | 2000 | 500 |
| Compound 1 | 320 | 320 | 320 | 320 | 320 | 320 |
| Compound 2 | 320 | 320 | 320 | 320 | 320 | 320 |
| Compound 3 | 320 | 320 | 320 | 320 | 320 | 320 |
| Compound 4 | 2.5 | 5 | 1.25 | 20 | 40 | 2.5 |
| Compound 5 | 10 | 10 | 10 | 320 | 320 | 20 |
| Compound 6 | 320 | 320 | 320 | 320 | 320 | 320 |
| Compound 7 | 320 | 320 | 320 | 320 | 320 | 320 |
| Compound 8 | 80 | 80 | 80 | 40 | 80 | 80 |
| Compound 10 | 10 | 10 | 10 | 160 | 160 | 10 |
| Compound 11 | 0.078 | 0.078 | 0.078 | 1.25 | 0.625 | 0.078 |
| Compound 12 | 320 | 320 | 320 | 320 | 320 | 320 |
| Compound 13 | 5 | 5 | 2.5 | 10 | 5 | 5 |
| Compound 14 | 320 | 320 | 320 | 320 | 320 | 320 |
| Compound 15 | 320 | 320 | 320 | 320 | 320 | 320 |
| Compound 16 | 5 | 5 | 2.5 | 80 | 80 | 5 |
| Compound 17 | 320 | 320 | 320 | 320 | 320 | 320 |
| Compound 18 | 1.25 | 1.25 | 1.25 | 320 | 20 | 1.25 |
| Compound 19 | 320 | 320 | 320 | 320 | 320 | 320 |

TABLE 15A
Fold change in the MIC of profiled compounds against EKO-35
efflux pump-integrated strains compared to EKO-35. Strains
were assessed in technical duplicate and values that showed
a 4-fold or greater increase in resistance compared to
EKO-35 are bolded. Related to FIGS. 4A-4F.

| | Fold change of MICs | | | | | |
|---|---|---|---|---|---|---|
| | EKO-35 araC::gene | | | | | |
| Compound | EKO-35 | acrB | acrD | acrEF | mdtEF | mdtBC |
| Rifampicin | 1 | 1 | 1 | 1 | 1 | 1 |
| Vancomycin | 1 | 1 | 1 | 1 | 1 | 1 |
| Fosfomycin | 1 | 1 | 1 | 1 | 1 | 1 |
| Ampicillin | 1 | 4 | 4 | 2 | 1 | 1 |
| Oxacillin | 1 | 256 | 256 | 256 | 32 | 1 |
| Chloramphenicol | 1 | 8 | 2 | 2 | 1 | 1 |
| Puromycin | 1 | 64 | 1 | 4 | 1 | 1 |
| Azithromycin | 1 | 16 | 1 | 8 | 8 | 1 |
| Erythromycin | 1 | 32 | 1 | 16 | 16 | 1 |
| Spectinomycin | 1 | 1 | 1 | 1 | 1 | 1 |
| Tetracycline | 1 | 4 | 1 | 1 | 1 | 1 |
| Linezolid | 1 | 32 | 1 | 2 | 1 | 1 |
| Kanamycin | 1 | 1 | 1 | 1 | 1 | 1 |
| Streptomycin | 1 | 2 | 2 | 1 | 2 | 2 |
| Minocycline | 1 | 8 | 2 | 2 | 1 | 1 |
| Fusidic acid | 1 | 128 | 32 | 16 | 16 | 2 |
| Ciprofloxacin | 1 | 4 | 1 | 4 | 1 | 1 |
| Norfloxacin | 1 | 4 | 1 | 4 | 1 | 1 |
| Nalidixic acid | 1 | 8 | 2 | 4 | 1 | 1 |
| Novobiocin | 1 | 128 | 64 | 128 | 16 | 4 |
| Trimethoprim | 1 | 8 | 2 | 4 | 2 | 1 |
| Doxorubicin | 1 | 128 | 2 | 64 | 64 | 1 |
| Daunorubicin | 1 | 64 | 2 | 64 | 64 | 1 |
| Ethidium bromide | 1 | 64 | 2 | 16 | 8 | 1 |
| Bicyclomycin | 1 | 1 | 1 | 1 | 1 | 1 |
| Sulfathiazole | 1 | 1 | 1 | 1 | 1 | 1 |
| Acriflavine | 1 | 32 | 2 | 8 | 2 | 1 |
| SDS | 1 | 32 | 32 | 32 | 32 | 2 |
| Benzalkonium | 1 | 32 | 1 | 4 | 4 | 1 |
| chloride | | | | | | |
| Deoxycholate | 1 | 4 | 4 | 4 | 4 | 4 |
| Sodium | 1 | 2 | 2 | 2 | 2 | 2 |
| taurodeoxycholate | | | | | | |
| Chlorhexidine | 1 | 1 | 1 | 1 | 1 | 1 |
| CCCP | 1 | 1 | 1 | 1 | 1 | 1 |
| Spermine | 1 | 1 | 1 | 1 | 1 | 1 |
| Compound 1 | 1 | 1 | 1 | 1 | 1 | 1 |
| Compound 2 | 1 | 1 | 1 | 1 | 1 | 1 |
| Compound 3 | 1 | 1 | 1 | 1 | 1 | 1 |
| Compound 4 | 1 | 16 | 16 | 16 | 16 | 1 |
| Compound 5 | 1 | 16 | 2 | 16 | 16 | 1 |
| Compound 6 | 1 | 1 | 1 | 1 | 1 | 1 |
| Compound 7 | 1 | 1 | 1 | 1 | 1 | 1 |
| Compound 8 | 1 | 2 | 1 | 1 | 1 | 1 |
| Compound 10 | 1 | 1 | 1 | 1 | 1 | 1 |
| Compound 11 | 1 | 4096 | 8 | 4096 | 128 | 1 |
| Compound 12 | 1 | 1 | 1 | 1 | 1 | 1 |
| Compound 13 | 1 | 8 | 8 | 8 | 8 | 1 |
| Compound 14 | 1 | 1 | 1 | 1 | 1 | 1 |
| Compound 15 | 1 | 1 | 1 | 1 | 1 | 1 |
| Compound 16 | 1 | 32 | 1 | 32 | 16 | 1 |
| Compound 17 | 1 | 1 | 1 | 1 | 1 | 1 |
| Compound 18 | 1 | 64 | 64 | 64 | 64 | 2 |
| Compound 19 | 1 | 1 | 1 | 1 | 1 | 1 |

TABLE 15B
Fold change in the MIC of profiled compounds against EKO-35
efflux pump-integrated strains compared to EKO-35. Strains
were assessed in technical duplicate and values that showed
a 4-fold or greater increase in resistance compared to
EKO-35 are bolded. Related to FIGS. 4A-4F.

| | Fold change of MICs | | | | |
|---|---|---|---|---|---|
| | EKO-35 araC::gene | | | | |
| Compound | macAB | emrKY | emrAB | mexCD | acrBD408A |
| Rifampicin | 1 | 1 | 1 | 1 | 1 |
| Vancomycin | 1 | 1 | 1 | 1 | 1 |
| Fosfomycin | 1 | 1 | 1 | 1 | 1 |
| Ampicillin | 1 | 1 | 1 | 1 | 1 |
| Oxacillin | 1 | 1 | 2 | 32 | 2 |
| Chloramphenicol | 1 | 1 | 1 | 1 | 1 |
| Puromycin | 1 | 1 | 1 | 4 | 1 |
| Azithromycin | 4 | 1 | 1 | 4 | 1 |
| Erythromycin | 4 | 1 | 1 | 8 | 1 |
| Spectinomycin | 1 | 1 | 1 | 1 | 1 |
| Tetracycline | 1 | 1 | 1 | 1 | 1 |
| Linezolid | 1 | 1 | 1 | 2 | 1 |
| Kanamycin | 1 | 1 | 1 | 1 | 1 |
| Streptomycin | 1 | 1 | 1 | 1 | 1 |
| Minocycline | 1 | 1 | 1 | 1 | 1 |
| Fusidic acid | 1 | 1 | 2 | 4 | 1 |
| Ciprofloxacin | 1 | 1 | 1 | 2 | 1 |
| Norfloxacin | 1 | 0 | 1 | 2 | 1 |
| Nalidixic acid | 1 | 1 | 8 | 2 | 1 |
| Novobiocin | 1 | 1 | 8 | 8 | 1 |
| Trimethoprim | 1 | 1 | 1 | 2 | 0 |
| Doxorubicin | 1 | 1 | 1 | 16 | 1 |
| Daunorubicin | 2 | 1 | 1 | 32 | 1 |
| Ethidium bromide | 1 | 1 | 1 | 8 | 2 |
| Bicyclomycin | 1 | 1 | 1 | 1 | 1 |
| Sulfathiazole | 1 | 1 | 1 | 1 | 1 |
| Acriflavine | 1 | 1 | 1 | 8 | 1 |
| SDS | 1 | 2 | 4 | 32 | 2 |
| Benzalkonium | 1 | 1 | 1 | 2 | 1 |
| chloride | | | | | |
| Deoxycholate | 1 | 1 | 4 | 4 | 1 |
| Sodium | 1 | 1 | 2 | 2 | 2 |
| taurodeoxycholate | | | | | |
| Chlorhexidine | 1 | 1 | 1 | 1 | 1 |
| CCCP | 1 | 1 | 4 | 1 | 1 |
| Spermine | 1 | 1 | 1 | 1 | 1 |
| Compound 1 | 1 | 1 | 1 | 1 | 1 |
| Compound 2 | 1 | 1 | 1 | 1 | 1 |
| Compound 3 | 1 | 1 | 1 | 1 | 1 |
| Compound 4 | 1 | 1 | 16 | 16 | 1 |
| Compound 5 | 1 | 1 | 16 | 16 | 1 |
| Compound 6 | 1 | 1 | 1 | 1 | 1 |
| Compound 7 | 1 | 1 | 1 | 1 | 1 |
| Compound 8 | 1 | 1 | 1 | 1 | 1 |
| Compound 10 | 1 | 1 | 1 | 1 | 1 |
| Compound 11 | 1 | 1 | 512 | 16 | 1 |
| Compound 12 | 1 | 1 | 1 | 1 | 1 |
| Compound 13 | 1 | 1 | 8 | 8 | 1 |
| Compound 14 | 1 | 1 | 1 | 1 | 1 |
| Compound 15 | 1 | 1 | 1 | 1 | 1 |
| Compound 16 | 1 | 1 | 16 | 16 | 1 |
| Compound 17 | 1 | 1 | 1 | 1 | 1 |
| Compound 18 | 1 | 1 | 64 | 64 | 1 |
| Compound 19 | 1 | 1 | 1 | 1 | 1 |

TABLE 16A
Fold change in the MIC of profiled compounds against EKO-35
efflux pump-integrated pore strains compared to EKO-35-Pore.
Strains were assessed in technical duplicate and values
that showed a 4-fold or greater increase in resistance compared
to EKO-35 are bolded. Related to FIGS. 4A-4F.

| | Fold changes of MICs | | | | |
|---|---|---|---|---|---|
| | EKO-35 araC::gene Pore | | | | |
| Compound | EKO-35 | acr-B | acrD | acrEF | mdtEF |
| Rifampicin | 1 | 4 | 1 | 1 | 1 |
| Vancomycin | 1 | 1 | 1 | 1 | 1 |
| Fosfomycin | 1 | 1 | 1 | 2 | 1 |
| Ampicillin | 1 | 8 | 16 | 2 | 1 |
| Oxacillin | 1 | 64 | 64 | 16 | 4 |
| Chloramphenicol | 1 | 4 | 1 | 1 | 1 |
| Puromycin | 1 | 64 | 1 | 4 | 2 |
| Azithromycin | 1 | 4 | 1 | 4 | 4 |
| Erythromycin | 1 | 32 | 1 | 8 | 8 |
| Spectinomycin | 1 | 2 | 2 | 1 | 1 |
| Tetracycline | 1 | 2 | 1 | 1 | 1 |
| Linezolid | 1 | 16 | 2 | 2 | 2 |
| Kanamycin | 1 | 2 | 1 | 1 | 1 |
| Streptomycin | 1 | 2 | 1 | 1 | 1 |
| Minocycline | 1 | 8 | 2 | 2 | 2 |
| Fusidic acid | 1 | 256 | 32 | 32 | 8 |
| Ciprofloxacin | 1 | 4 | 1 | 4 | 1 |
| Norfloxacin | 1 | 8 | 2 | 4 | 2 |
| Nalidixic acid | 1 | 8 | 1 | 2 | 1 |
| Novobiocin | 1 | 512 | 32 | 32 | 16 |
| Trimethoprim | 1 | 4 | 1 | 1 | 2 |
| Doxorubicin | 1 | 64 | 1 | 16 | 32 |
| Daunorubicin | 1 | 128 | 2 | 32 | 64 |
| Ethidium bromide | 1 | 64 | 2 | 16 | 8 |
| Bicyclomycin | 1 | 1 | 1 | 1 | 1 |
| Sulfathiazole | 1 | 2 | 1 | 1 | 2 |
| Acriflavine | 1 | 16 | 2 | 8 | 2 |
| SDS | 1 | 32 | 32 | 32 | 32 |
| Benzalkonium | 1 | 8 | 1 | 2 | 4 |
| chloride | | | | | |
| Deoxycholate | 1 | 8 | 8 | 8 | 8 |
| Sodium | 1 | 4 | 4 | 4 | 4 |
| taurodeoxycholate | | | | | |
| Chlorhexidine | 1 | 1 | 1 | 1 | 1 |
| CCCP | 1 | 1 | 1 | 1 | 1 |
| Spermine | 1 | 1 | 1 | 1 | 1 |
| Compound 1 | 1 | 1 | 1 | 1 | 1 |
| Compound 2 | 1 | 1 | 1 | 1 | 1 |
| Compound 3 | 1 | 1 | 1 | 1 | 1 |
| Compound 4 | 1 | 128 | 4 | 128 | 128 |
| Compound 5 | 1 | 16 | 1 | 16 | 16 |
| Compound 6 | 1 | 1 | 1 | 1 | 1 |
| Compound 7 | 1 | 1 | 1 | 1 | 1 |
| Compound 8 | 1 | 2 | 1 | 1 | 1 |
| Compound 10 | 1 | 16 | 16 | 16 | 16 |
| Compound 11 | 1 | 1024 | 4 | 1024 | 64 |
| Compound 12 | 1 | 2 | 1 | 2 | 2 |
| Compound 13 | 1 | 64 | 2 | 4 | 8 |
| Compound 14 | 1 | 1 | 1 | 1 | 1 |
| Compound 15 | 1 | 1 | 1 | 1 | 1 |
| Compound 16 | 1 | 32 | 1 | 16 | 16 |
| Compound 17 | 1 | 1 | 1 | 1 | 1 |
| Compound 18 | 1 | 256 | 8 | 256 | 256 |
| Compound 19 | 1 | 1 | 1 | 1 | 1 |

TABLE 16B
Fold change in the MIC of profiled compounds against EKO-35 efflux pump-
integrated pore strains compared to EKO-35-Pore. Strains were assessed in
technical duplicate and values that showed a 4-fold or greater increase
in resistance compared to EKO-35 are bolded. Related to FIGS. 4A-4F.

| | Fold changes of MICs | | | | | |
|---|---|---|---|---|---|---|
| | EKO-35 araC::gene Pore | | | | | |
| Compound | mdtBC | macAB | emrKY | emrAB | mexCD | acrB_{D408A} |
| Rifampicin | 2 | 1 | 1 | 1 | 1 | 1 |
| Vancomycin | 0 | 1 | 1 | 1 | 1 | 1 |
| Fosfomycin | 1 | 1 | 1 | 2 | 2 | 1 |
| Ampicillin | 1 | 1 | 2 | 1 | 1 | 1 |
| Oxacillin | 1 | 1 | 1 | 1 | 8 | 1 |
| Chloramphenicol | 1 | 1 | 1 | 1 | 1 | 1 |
| Puromycin | 1 | 1 | 2 | 1 | 2 | 1 |
| Azithromycin | 1 | 2 | 1 | 1 | 2 | 2 |
| Erythromycin | 1 | 4 | 1 | 1 | 8 | 0 |
| Spectinomycin | 1 | 1 | 1 | 1 | 1 | 1 |
| Tetracycline | 1 | 1 | 1 | 1 | 1 | 1 |
| Linezolid | 1 | 1 | 1 | 2 | 2 | 1 |
| Kanamycin | 1 | 2 | 1 | 1 | 1 | 1 |
| Streptomycin | 1 | 1 | 1 | 1 | 1 | 1 |
| Minocycline | 1 | 1 | 1 | 1 | 1 | 1 |
| Fusidic acid | 1 | 1 | 1 | 4 | 4 | 1 |
| Ciprofloxacin | 1 | 1 | 1 | 2 | 2 | 1 |
| Norfloxacin | 2 | 2 | 1 | 2 | 4 | 2 |
| Nalidixic acid | 1 | 1 | 1 | 8 | 2 | 1 |
| Novobiocin | 4 | 1 | 1 | 8 | 4 | 1 |
| Trimethoprim | 1 | 1 | 2 | 2 | 1 | 1 |
| Doxorubicin | 4 | 1 | 1 | 1 | 4 | 1 |
| Daunorubicin | 4 | 2 | 1 | 2 | 16 | 1 |
| Ethidium bromide | 1 | 1 | 1 | 1 | 8 | 1 |
| Bicyclomycin | 1 | 1 | 1 | 1 | 1 | 1 |
| Sulfathiazole | 1 | 2 | 1 | 2 | 1 | 0 |
| Acriflavine | 1 | 2 | 1 | 2 | 4 | 1 |
| SDS | 1 | 1 | 1 | 4 | 4 | 1 |
| Benzalkonium | 1 | 1 | 1 | 1 | 1 | 1 |
| chloride | | | | | | |
| Deoxycholate | 4 | 1 | 1 | 4 | 2 | 1 |
| Sodium | 4 | 1 | 1 | 2 | 4 | 1 |
| taurodeoxycholate | | | | | | |
| Chlorhexidine | 1 | 1 | 1 | 1 | 1 | 1 |
| CCCP | 2 | 1 | 1 | 2 | 1 | 1 |
| Spermine | 1 | 1 | 1 | 1 | 1 | 0 |
| Compound 1 | 1 | 1 | 1 | 1 | 1 | 1 |
| Compound 2 | 1 | 1 | 1 | 1 | 1 | 1 |
| Compound 3 | 1 | 1 | 1 | 1 | 1 | 1 |
| Compound 4 | 1 | 2 | 1 | 8 | 16 | 1 |
| Compound 5 | 1 | 1 | 1 | 16 | 16 | 1 |
| Compound 6 | 1 | 1 | 1 | 1 | 1 | 1 |
| Compound 7 | 1 | 1 | 1 | 1 | 1 | 1 |
| Compound 8 | 1 | 1 | 1 | 1 | 1 | 1 |
| Compound 10 | 1 | 1 | 1 | 16 | 16 | 1 |
| Compound 11 | 1 | 1 | 1 | 16 | 8 | 1 |
| Compound 12 | 2 | 2 | 2 | 2 | 2 | 2 |
| Compound 13 | 1 | 1 | 1 | 2 | 1 | 1 |
| Compound 14 | 1 | 1 | 1 | 1 | 1 | 1 |
| Compound 15 | 1 | 1 | 1 | 1 | 1 | 1 |
| Compound 16 | 1 | 1 | 1 | 16 | 16 | 1 |
| Compound 17 | 1 | 1 | 1 | 1 | 1 | 1 |
| Compound 18 | 1 | 1 | 1 | 256 | 16 | 1 |
| Compound 19 | 1 | 1 | 1 | 1 | 1 | |

TABLE 17
The physicochemical substrate parameters of drug efflux pumps assessed using EKO-35
and EKO-35-Pore strains. Molecular properties were summarized using the SMILES
chemical notation for each compound and DataWarrior (Version 5.5.0). Median values
are indicated in parentheses. (Related to FIG. 4A-4F and Table 7).

| | | | Molecular | | | Polar |
|---|---|---|---|---|---|---|
| | | Compounds | Weight | | | Surface |
| Gene | Pore | Effluxed | (g/mol) | logP | logS | Area |
| AcrB | − | 28/33 | 227.778 to | −1.986 to | −7.266 to | 0 to |
| | | | 748.992 | 5.823 | −1.265 | 206.070 |
| | | | (393.447) | (1.081) | (−3.641) | (104.785) |
| | + | 30/33 | 227.778 to | −1.986 to | −7.266 to | 0 to 220.15 |
| | | | 822.95 | 5.823 | −1.435 | (107.66) |
| | | | (393.447) | (1.664) | (−4.027) | |
| AcrEF | − | 23/33 | 227.778 to | −1.986 to | −7.266 to | 0 to |
| | | | 748.992 | 5.823 | −1.705 | 206.070 |
| | | | (394.315) | (1.672) | (−4.507) | (90.240) |
| | + | 22/33 | 285.215 to | −1.986 to | −7.266 to | 54.79 to |
| | | | 748.992 | 5.823 | −2.031 | 206.070 |
| | | | (414.846) | (2.095) | (−4.807) | (106.935) |
| MdtEF | − | 17/33 | 227.778 to | −0.340 to | −7.266 to | 0 to |
| | | | 748.992 | 5.823 | −1.705 | 206.070 |
| | | | (401.442) | (2.129) | (−4.879) | (104.060) |
| | + | 19/33 | 227.778 to | −0.340 to | −7.266 to | 0 to |
| | | | 748.992 | 5.823 | −1.705 | 206.070 |
| | | | (401.442) | (2.129) | (−4.879) | (109.810) |
| AcrD | − | 10/33 | 285.215 to | −1.653 to | −7.266 to | 65.200 to |
| | | | 612.63 | 5.823 | −1.565 | 196.100 |
| | | | (397.010) | (3.125) | (−5.076) | (114.145) |
| | + | 11/33 | 285.215 to | −1.653 to | −7.266 to | 71.98 to |
| | | | 612.63 | 5.823 | −1.565 | 196.100 |
| | | | (401.442) | (2.980) | (−5.272) | (124.230) |
| EmrAB | − | 11/33 | 204.620 to | 0.536 to | −7.266 to | 54.790 to |
| | | | 612.63 | 4.077 | −2.031 | 196.100 |
| | | | (341.676) | (3.270) | (−4.879) | (77.76) |
| | + | 11/33 | 232.238 to | 0.536 to | −7.266 to | 54.790 to |
| | | | 612.63 | 5.823 | −2.031 | 196.100 |
| | | | (341.676) | (3.369) | (−5.363) | (90.240) |
| MacAB | − | 2/33 | 733.933 to | 1.657 to | −3.645 to | 180.080 to |
| | | | 748.992 | 1.672 | −3.094 | 193.910 |
| | | | (741.463) | (1.664) | (−3.370) | (186.995) |
| | + | 1/33 | 733.933 | 1.672 | −3.645 | 193.91 |
| MdtBC | − | 2/33 | 392.578 to | 3.27 to | −5.272 to | 77.760 to |
| | | | 612.63 | 4.032 | −4.879 | 196.100 |
| | | | (502.604) | (3.651) | (−5.076) | (136.930) |
| | + | 5/33 | 392.578 to | 0.167 to | −5.272 to | 77.76 to |
| | | | 612.63 | 4.032 | −4.395 | 206.70 |
| | | | (527.524) | (2.091) | (−4.879) | (185.84) |
| EmrKY | − | 0/33 | — | — | — | — |
| | + | 0/33 | — | — | — | — |
| MexCD | − | 18/33 | 285.215 to | −1.986 to | −7.266 to | 54.790 to |
| | | | 748.992 | 5.823 | −2.031 | 206.070 |
| | | | (443.887) | (2.113) | (−4.871) | (114.145) |
| | + | 17/33 | 285.215 to | −1.986 to | −7.266 to | 54.790 to |
| | | | 733.933 | 5.823 | −2.031 | 206.070 |
| | | | (428.25) | (2.098) | (−5.014) | (109.810) |

TABLE 18A
Defining the Fractional Inhibitory Concentration Index (FICI)
for PABN in combination with different antibiotics using
EKO-35 and the efflux platform. The FICI represents
the ΣFIC of each drug. The FIC for each drug was
determined by dividing the MIC of each drug in combination
by the MIC of each drug alone. ΣFIC = FIC_{A} + FIC_{B} =
(C_{A}/MIC_{A}) + (C_{B}/MIC_{B}). MIC_{A} and MIC_{B} are the MICs of drugs
A (PAβN) and B (antibiotic) alone, respectively. CA and CB
are the MICs of the drugs in combination. Synergy (FICI ≤0.5),
indifferent (FICI >1.0;), and additive (FICI >0.5-1.0).
Related to FIGS. 5A-5J.

| | | PABN | PABN | | |
|---|---|---|---|---|---|
| | | MICₐ | MICₐ | | |
| | | Alone | Combined | | |
| Strain | Compound | (μg/mL) | (μg/mL) | FICI | Effect |
| K-12 | Ciprofloxacin | 256 | 64 | 1.250 | — |
| ΔtolC | Ciprofloxacin | 64 | 32 | 1.000 | — |
| EKO-35 | Ciprofloxacin | 64 | 4 | 0.563 | Additive |
| EKO-35 | Ciprofloxacin | 64 | 8 | 0.625 | Additive |
| acrB_{D408A} | | | | | |
| EKO-35 | Ciprofloxacin | 32 | 16 | 1.000 | — |
| acrEF | | | | | |
| EKO-35 | Ciprofloxacin | 64 | 8 | 0.375 | Synergistic |
| mexCD | | | | | |
| K-12 | Ciprofloxacin | 256 | 256 | 2.000 | — |
| Pore | | | | | |
| ΔtolC | Ciprofloxacin | 128 | 64 | 0.551 | Additive |
| Pore | | | | | |
| EKO-35 | Ciprofloxacin | 64 | 2 | 0.531 | Additive |
| Pore | | | | | |
| EKO-35 | Ciprofloxacin | 32 | 8 | 0.750 | Additive |
| acrB_{D408A} | | | | | |
| Pore | | | | | |
| EKO-35 | Ciprofloxacin | 64 | 16 | 0.750 | Additive |
| acrEF | | | | | |
| Pore | | | | | |
| EKO-35 | Ciprofloxacin | 64 | 16 | 0.506 | Additive |
| mexCD | | | | | |
| Pore | | | | | |
| K-12 | Erythromycin | 256 | 16 | 0.094 | Synergistic |
| ΔtolC | Erythromycin | 64 | 8 | 0.188 | Synergistic |
| EKO-35 | Erythromycin | 128 | 8 | 0.093 | Synergistic |
| EKO-35 | Erythromycin | 64 | 8 | 0.190 | Synergistic |
| acrB_{D408A} | | | | | |
| EKO-35 | Erythromycin | 256 | 16 | 0.078 | Synergistic |
| acrB | | | | | |
| EKO-35 | Erythromycin | 128 | 16 | 0.188 | Synergistic |
| acrEF | | | | | |
| EKO-35 | Erythromycin | 256 | 16 | 0.094 | Synergistic |
| mdtEF | | | | | |
| EKO-35 | Erythromycin | 64 | 8 | 0.188 | Synergistic |
| mexCD | | | | | |
| K-12 | Erythromycin | 256 | 64 | 0.313 | Synergistic |
| Pore | | | | | |
| ΔtolC | Erythromycin | 128 | 16 | 0.188 | Synergistic |
| Pore | | | | | |
| EKO-35 | Erythromycin | 64 | 8 | 0.610 | Additive |
| Pore | | | | | |
| EKO-35 | Erythromycin | 64 | 16 | 0.735 | Additive |
| acrB_{D408A} | | | | | |
| Pore | | | | | |
| EKO-35 | Erythromycin | 256 | 16 | 0.078 | Synergistic |
| acrB Pore | | | | | |
| EKO-35 | Erythromycin | 128 | 16 | 0.385 | Synergistic |
| acrEF | | | | | |
| Pore | | | | | |
| EKO-35 | Erythromycin | 256 | 32 | 0.185 | Synergistic |
| mdtEF | | | | | |
| Pore | | | | | |
| EKO-35 | Erythromycin | 64 | 8 | 0.385 | Synergistic |
| mexCD | | | | | |
| Pore | | | | | |
| K-12 | Fusidic Acid | 256 | 32 | 0.156 | Synergistic |
| ΔtolC | Fusidic Acid | 64 | 16 | 0.375 | Synergistic |
| EKO-35 | Fusidic Acid | 128 | 16 | 0.158 | Synergistic |
| EKO-35 | Fusidic Acid | 64 | 8 | 0.250 | Synergistic |
| acrB_{D408A} | | | | | |
| EKO-35 | Fusidic Acid | 256 | 32 | 0.129 | Synergistic |
| acrB | | | | | |
| EKO-35 | Fusidic Acid | 64 | 8 | 0.141 | Synergistic |
| acrD | | | | | |
| EKO-35 | Fusidic Acid | 64 | 8 | 0.375 | Synergistic |
| acrEF | | | | | |
| EKO-35 | Fusidic Acid | 64 | 8 | 0.250 | Synergistic |
| mdtEF | | | | | |
| K-12 | Fusidic Acid | 256 | 32 | 0.188 | Synergistic |
| Pore | | | | | |
| ΔtolC | Fusidic Acid | 128 | 32 | 0.375 | Synergistic |
| Pore | | | | | |
| EKO-35 | Fusidic Acid | 64 | 16 | 0.310 | Synergistic |
| Pore | | | | | |
| EKO-35 | Fusidic Acid | 64 | 8 | 0.255 | Synergistic |
| acrB_{D408A} | | | | | |
| Pore | | | | | |
| EKO-35 | Fusidic Acid | 256 | 32 | 0.129 | Synergistic |
| acrB Pore | | | | | |
| EKO-35 | Fusidic Acid | 64 | 8 | 0.250 | Synergistic |
| acrD | | | | | |
| Pore | | | | | |
| EKO-35 | Fusidic Acid | 128 | 8 | 0.313 | Synergistic |
| acrEF | | | | | |
| Pore | | | | | |
| EKO-35 | Fusidic Acid | 64 | 8 | 0.250 | Synergistic |
| mdtEF Pore | | | | | |
| K-12 | Linezolid | 256 | 16 | 0.125 | Synergistic |
| ΔtolC | Linezolid | 128 | 64 | 0.750 | Additive |
| EKO-35 | Linezolid | 64 | 32 | 0.750 | Additive |
| EKO-35 | Linezolid | 64 | 32 | 0.750 | Additive |
| acrB_{D408A} | | | | | |
| EKO35 | Linezolid | 256 | 16 | 0.125 | Synergistic |
| araC::acrB | | | | | |
| K-12 | Linezolid | 256 | 32 | 0.250 | Synergistic |
| Pore | | | | | |
| ΔtolC | Linezolid | 128 | 64 | 0.563 | Additive |
| Pore | | | | | |
| EKO-35 | Linezolid | 64 | 32 | 1.000 | — |
| Pore | | | | | |
| EKO-35 | Linezolid | 64 | 32 | 1.000 | — |
| acrB_{D408A} | | | | | |
| Pore | | | | | |
| EKO-35 | Linezolid | 256 | 16 | 0.125 | Synergistic |
| acrB Pore | | | | | |
| K-12 | Novobiocin | 256 | 32 | 0.188 | Synergistic |
| ΔtolC | Novobiocin | 64 | 16 | 0.500 | Synergistic |
| EKO-35 | Novobiocin | 64 | 8 | 0.375 | Synergistic |
| EKO-35 | Novobiocin | 64 | 8 | 0.375 | Synergistic |
| acrB_{D408A} | | | | | |
| EKO-35 | Novobiocin | 256 | 32 | 0.156 | Synergistic |
| acrB | | | | | |
| EKO-35 | Novobiocin | 64 | 16 | 0.313 | Synergistic |
| acrD | | | | | |
| K-12 | Novobiocin | 256 | 2 | 0.508 | Additive |
| Pore | | | | | |
| ΔtolC | Novobiocin | 64 | 32 | 0.740 | Additive |
| Pore | | | | | |
| EKO-35 | Novobiocin | 32 | 16 | 0.630 | Additive |
| Pore | | | | | |
| EKO-35 | Novobiocin | 16 | 8 | 0.750 | Additive |
| acrB_{D408A} | | | | | |
| Pore | | | | | |
| EKO-35 | Novobiocin | 256 | 16 | 0.094 | Synergistic |
| acrB Pore | | | | | |
| EKO-35 | Novobiocin | 32 | 16 | 0.563 | Additive |
| acrD Pore | | | | | |
| K-12 | Oxacillin | 256 | 32 | 0.188 | Synergistic |
| ΔtolC | Oxacillin | 128 | 8 | 0.313 | Synergistic |
| EKO-35 | Oxacillin | 64 | 4 | 0.323 | Synergistic |
| EKO-35 | Oxacillin | 128 | 16 | 0.185 | Synergistic |
| acrB_{D408A} | | | | | |
| EKO-35 | Oxacillin | 256 | 16 | 0.125 | Synergistic |
| acrB | | | | | |
| EKO-35 | Oxacillin | 128 | 4 | 0.156 | Synergistic |
| acrD | | | | | |
| EKO-35 | Oxacillin | 128 | 16 | 0.133 | Synergistic |
| acrEF | | | | | |
| K-12 | Oxacillin | 256 | 64 | 0.750 | Additive |
| Pore | | | | | |
| ΔtolC | Oxacillin | 128 | 64 | 0.740 | Additive |
| Pore | | | | | |
| EKO-35 | Oxacillin | 64 | 32 | 1.020 | — |
| Pore | | | | | |
| EKO-35 | Oxacillin | 64 | 32 | 1.020 | — |
| acrB_{D408A} | | | | | |
| Pore | | | | | |
| EKO-35 | Oxacillin | 256 | 16 | 0.188 | Synergistic |
| acrB Pore | | | | | |
| EKO-35 | Oxacillin | 64 | 16 | 0.500 | Synergistic |
| acrD Pore | | | | | |
| EKO-35 | Oxacillin | 128 | 32 | 0.500 | Synergistic |
| acrEF Pore | | | | | |

TABLE 18B
The FICI represents the ΣFIC of each drug. The FIC for each drug
was determined by dividing the MIC of each drug in combination by the MIC of each
drug alone. ΣFIC = FIC_{A} + FIC_{B} = (C_{A}/MIC_{A}) + (C_{B}/MIC_{B}).
MIC_{A} and MIC_{B} are the MICs of drugs A (PAβN) and B (antibiotic) alone,
respectively. CA and CB are the MICs of the drugs in combination. Synergy
(FICI ≤0.5), indifferent (FICI >1.0), and additive (FICI >0.5-
1.0). Related to FIG. 5A-5J.

| | | MIC_{b} | MIC_{b} | | |
|---|---|---|---|---|---|
| | | Alone | Combined | | |
| Strain | Compound | (μg/mL) | (μg/mL) | FICI | Effect |
| K-12 | Ciprofloxacin | 0.0156 | 0.0156 | 1.250 | — |
| ΔtolC | Ciprofloxacin | 0.0078 | 0.0039 | 1.000 | — |
| EKO-35 | Ciprofloxacin | 0.0078 | 0.0039 | 0.563 | Additive |
| EKO-35 | Ciprofloxacin | 0.0078 | 0.0039 | 0.625 | Additive |
| acrB_{D408A} | | | | | |
| EKO-35 acrEF | Ciprofloxacin | 0.0156 | 0.0078 | 1.000 | — |
| EKO-35 | Ciprofloxacin | 0.0156 | 0.0039 | 0.375 | Synergistic |
| mexCD | | | | | |
| K-12 Pore | Ciprofloxacin | 0.0313 | 0.0313 | 2.000 | |
| ΔtolC Pore | Ciprofloxacin | 0.0039 | 0.0002 | 0.551 | Additive |
| EKO-35 Pore | Ciprofloxacin | 0.0078 | 0.0039 | 0.531 | Additive |
| EKO-35 | Ciprofloxacin | 0.0078 | 0.0039 | 0.750 | Additive |
| acrB_{D408A} Pore | | | | | |
| EKO-35 acrEF | Ciprofloxacin | 0.0078 | 0.0039 | 0.750 | Additive |
| Pore | | | | | |
| EKO-35 | Ciprofloxacin | 0.0078 | 0.002 | 0.506 | Additive |
| mexCD Pore | | | | | |
| K-12 | Erythromycin | 64 | 2 | 0.094 | Synergistic |
| ΔtolC | Erythromycin | 4 | 0.25 | 0.188 | Synergistic |
| EKO-35 | Erythromycin | 2 | 0.06 | 0.093 | Synergistic |
| EKO-35 | Erythromycin | 2 | 0.13 | 0.190 | Synergistic |
| acrB_{D408A} | | | | | |
| EKO-35 acrB | Erythromycin | 64 | 1 | 0.078 | Synergistic |
| EKO-35 acrEF | Erythromycin | 8 | 0.5 | 0.188 | Synergistic |
| EKO-35 | Erythromycin | 16 | 0.5 | 0.094 | Synergistic |
| mdtEF | | | | | |
| EKO-35 | Erythromycin | 8 | 0.5 | 0.188 | Synergistic |
| mexCD | | | | | |
| K-12 Pore | Erythromycin | 4 | 0.25 | 0.313 | Synergistic |
| δtolC Pore | Erythromycin | 1 | 0.063 | 0.188 | Synergistic |
| EKO-35 Pore | Erythromycin | 0.13 | 0.063 | 0.610 | Additive |
| EKO-35 | Erythromycin | 0.13 | 0.063 | 0.735 | Additive |
| acrB_{D408A} Pore | | | | | |
| EKO-35 acrB | Erythromycin | 32 | 0.5 | 0.078 | Synergistic |
| Pore | | | | | |
| EKO-35 acrEF | Erythromycin | 0.5 | 0.13 | 0.385 | Synergistic |
| Pore | | | | | |
| EKO-35 | Erythromycin | 1 | 0.06 | 0.185 | Synergistic |
| mdtEF Pore | | | | | |
| EKO-35 | Erythromycin | 0.5 | 0.13 | 0.385 | Synergistic |
| mexCD Pore | | | | | |
| K-12 | Fusidic Acid | 1024 | 32 | 0.156 | Synergistic |
| ΔtolC | Fusidic Acid | 2 | 0.25 | 0.375 | Synergistic |
| EKO-35 | Fusidic Acid | 4 | 0.13 | 0.158 | Synergistic |
| EKO-35 | Fusidic Acid | 4 | 0.5 | 0.250 | Synergistic |
| acrB_{D408A} | | | | | |
| EKO-35 acrB | Fusidic Acid | 1024 | 4 | 0.129 | Synergistic |
| EKO-35 acrD | Fusidic Acid | 256 | 4 | 0.141 | Synergistic |
| EKO-35 acrEF | Fusidic Acid | 32 | 8 | 0.375 | Synergistic |
| EKO-35 | Fusidic Acid | 64 | 8 | 0.250 | Synergistic |
| mdtEF | | | | | |
| K-12 Pore | Fusidic Acid | 512 | 32 | 0.188 | Synergistic |
| δtolC Pore | Fusidic Acid | 2 | 0.25 | 0.375 | Synergistic |
| EKO-35 Pore | Fusidic Acid | 1 | 0.06 | 0.310 | Synergistic |
| EKO-35 | Fusidic Acid | 1 | 0.13 | 0.255 | Synergistic |
| acrB_{D408A} Pore | | | | | |
| EKO-35 acrB | Fusidic Acid | 512 | 2 | 0.129 | Synergistic |
| Pore | | | | | |
| EKO-35 acrD | Fusidic Acid | 64 | 8 | 0.250 | Synergistic |
| Pore | | | | | |
| EKO-35 acrEF | Fusidic Acid | 4 | 1 | 0.313 | Synergistic |
| Pore | | | | | |
| EKO-35 | Fusidic Acid | 16 | 2 | 0.250 | Synergistic |
| mdtEF Pore | | | | | |
| K-12 | Linezolid | 256 | 16 | 0.125 | Synergistic |
| ΔtolC | Linezolid | 8 | 2 | 0.750 | Additive |
| EKO-35 | Linezolid | 16 | 4 | 0.750 | Additive |
| EKO-35 | Linezolid | 16 | 4 | 0.750 | Additive |
| acrB_{D408A} | | | | | |
| EKO35 | Linezolid | 256 | 16 | 0.125 | Synergistic |
| araC::acrB | | | | | |
| K-12 Pore | Linezolid | 128 | 16 | 0.250 | Synergistic |
| ΔtolC Pore | Linezolid | 8 | 0.5 | 0.563 | Additive |
| EKO-35 Pore | Linezolid | 8 | 4 | 1.000 | — |
| EKO-35 | Linezolid | 8 | 4 | 1.000 | — |
| acrB_{D408A} Pore | | | | | |
| EKO-35 acrB | Linezolid | 128 | 8 | 0.125 | Synergistic |
| Pore | | | | | |
| K-12 | Novobiocin | 128 | 8 | 0.188 | Synergistic |
| ΔtolC | Novobiocin | 2 | 0.5 | 0.500 | Synergistic |
| EKO-35 | Novobiocin | 4 | 1 | 0.375 | Synergistic |
| EKO-35 | Novobiocin | 8 | 2 | 0.375 | Synergistic |
| acrB_{D408A} | | | | | |
| EKO-35 acrB | Novobiocin | 1024 | 32 | 0.156 | Synergistic |
| EKO-35 acrD | Novobiocin | 512 | 32 | 0.313 | Synergistic |
| K-12 Pore | Novobiocin | 16 | 8 | 0.508 | Additive |
| ΔtolC Pore | Novobiocin | 0.25 | 0.06 | 0.740 | Additive |
| EKO-35 Pore | Novobiocin | 1 | 0.13 | 0.630 | Additive |
| EKO-35 | Novobiocin | 1 | 0.25 | 0.750 | Additive |
| acrB_{D408A} Pore | | | | | |
| EKO-35 acrB | Novobiocin | 512 | 16 | 0.094 | Synergistic |
| Pore | | | | | |
| EKO-35 acrD | Novobiocin | 16 | 1 | 0.563 | Additive |
| Pore | | | | | |
| K-12 | Oxacillin | 512 | 32 | 0.188 | Synergistic |
| ΔtolC | Oxacillin | 1 | 0.25 | 0.313 | Synergistic |
| EKO-35 | Oxacillin | 0.5 | 0.13 | 0.323 | Synergistic |
| EKO-35 | Oxacillin | 1 | 0.06 | 0.185 | Synergistic |
| acrB_{D408A} | | | | | |
| EKO-35 acrB | Oxacillin | 1024 | 64 | 0.125 | Synergistic |
| EKO-35 acrD | Oxacillin | 128 | 16 | 0.156 | Synergistic |
| EKO-35 acrEF | Oxacillin | 256 | 2 | 0.133 | Synergistic |
| K-12 Pore | Oxacillin | 32 | 16 | 0.750 | Additive |
| ΔtolC Pore | Oxacillin | 0.25 | 0.06 | 0.740 | Additive |
| EKO-35 Pore | Oxacillin | 0.25 | 0.13 | 1.020 | — |
| EKO-35 | Oxacillin | 0.25 | 0.13 | 1.020 | — |
| acrB_{D408A} Pore | | | | | |
| EKO-35 acrB | Oxacillin | 128 | 16 | 0.188 | Synergistic |
| Pore | | | | | |
| EKO-35 acrD | Oxacillin | 4 | 1 | 0.500 | Synergistic |
| Pore | | | | | |
| EKO-35 acrEF | Oxacillin | 4 | 1 | 0.500 | Synergistic |
| Pore | | | | | |

TABLE 19A
Defining the Fractional Inhibitory Concentration Index (FICI) for NMP in combination
with different antibiotics using EKO-35 and the efflux platform. The FICI
represents the ΣFIC of each drug. The FIC for each drug was determined by
dividing the MIC of each drug in combination by the MIC of each drug alone. ΣFIC =
FIC_{A} + FIC_{B} = (C_{A}/MIC_{A}) + (C_{B}/MIC_{B}). MIC_{A} and MIC_{B} are the MICs of
drugs A (NMP) and B (antibiotic) alone, respectively. C_{A} and C_{B} are the MICs
of the drugs in combination. Synergy (FICI ≤0.5), indifferent (FICI >1.0),
and additive (FICI >0.5-1.0). Related to FIGS. 5A-5J.

| | | NMP | NMP | | |
|---|---|---|---|---|---|
| | | MICₐ | MICₐ | | |
| | | Alone | Combined | | |
| Strain | Compound | (μg/mL) | (μg/mL) | FICI | Effect |
| K-12 | Ciprofloxacin | 512 | 128 | 0.748 | Additive |
| ΔtolC | Ciprofloxacin | 512 | 512 | 2.000 | — |
| EKO-35 | Ciprofloxacin | 512 | 512 | 2.000 | — |
| EKO-35 | Ciprofloxacin | 512 | 64 | 0.625 | Additive |
| acrB_{D408A} | | | | | |
| EKO-35 acrEF | Ciprofloxacin | 256 | 64 | 0.748 | Additive |
| EKO-35 | Ciprofloxacin | 512 | 128 | 0.750 | Additive |
| mexCD | | | | | |
| K-12 Pore | Ciprofloxacin | 512 | 512 | 2.000 | — |
| δtolC Pore | Ciprofloxacin | 512 | 256 | 0.750 | Additive |
| EKO-35 Pore | Ciprofloxacin | 512 | 512 | 2.000 | — |
| EKO-35 | Ciprofloxacin | 512 | 4 | 0.508 | Additive |
| acrB_{D408A} Pore | | | | | |
| EKO-35 acrEF | Ciprofloxacin | 512 | 256 | 0.526 | Additive |
| Pore | | | | | |
| EKO-35 | Ciprofloxacin | 512 | 256 | 1.000 | — |
| mexCD Pore | | | | | |
| K-12 | Erythromycin | 256 | 128 | 0.625 | Additive |
| ΔtolC | Erythromycin | 256 | 128 | 1.000 | — |
| EKO-35 | Erythromycin | 1024 | 256 | 0.375 | Synergistic |
| EKO-35 | Erythromycin | 1024 | 256 | 0.500 | Synergistic |
| acrB_{D408A} | | | | | |
| EKO-35 acrB | Erythromycin | 256 | 8 | 0.531 | Additive |
| EKO-35 acrEF | Erythromycin | 256 | 256 | 2.000 | — |
| EKO-35 mdtEF | Erythromycin | 512 | 64 | 0.250 | Synergistic |
| EKO-35 | Erythromycin | 64 | 16 | 0.375 | Synergistic |
| mexCD | | | | | |
| K-12 Pore | Erythromycin | 512 | 256 | 1.000 | — |
| ΔtolC Pore | Erythromycin | 512 | 256 | 0.625 | Synergistic |
| EKO-35 Pore | Erythromycin | 512 | 128 | 0.770 | Additive |
| EKO-35 | Erythromycin | 512 | 128 | 0.735 | Additive |
| acrB_{D408A} Pore | | | | | |
| EKO-35 acrB | Erythromycin | 512 | 256 | 0.563 | Additive |
| Pore | | | | | |
| EKO-35 acrEF | Erythromycin | 512 | 128 | 0.750 | Additive |
| Pore | | | | | |
| EKO-35 mdtEF | Erythromycin | 256 | 128 | 0.625 | Additive |
| Pore | | | | | |
| EKO-35 | Erythromycin | 128 | 64 | 0.565 | Additive |
| mexCD Pore | | | | | |
| K-12 | Ethidium | 512 | 64 | 0.375 | Synergistic |
| | Bromide | | | | |
| ΔtolC | Ethidium | 1024 | 32 | 0.281 | Synergistic |
| | Bromide | | | | |
| EKO-35 | Ethidium | 512 | 512 | 2.000 | — |
| | Bromide | | | | |
| EKO-35 | Ethidium | 1024 | 256 | 0.750 | Additive |
| acrB_{D408A} | Bromide | | | | |
| EKO-35 acrB | Ethidium | 1024 | 128 | 0.253 | Synergistic |
| | Bromide | | | | |
| EKO-35 acrEF | Ethidium | 1024 | 256 | 0.500 | Synergistic |
| | Bromide | | | | |
| K-12 Pore | Ethidium | 512 | 128 | 0.375 | Synergistic |
| | Bromide | | | | |
| ΔtolC Pore | Ethidium | 512 | 128 | 0.500 | Additive |
| | Bromide | | | | |
| EKO-35 Pore | Ethidium | 512 | 4 | 0.508 | Additive |
| | Bromide | | | | |
| EKO-35 | Ethidium | 512 | 256 | 1.000 | — |
| acrB_{D408A} Pore | Bromide | | | | |
| EKO-35 acrB | Ethidium | 512 | 32 | 0.191 | Synergistic |
| Pore | Bromide | | | | |
| EKO-35 acrEF | Ethidium | 512 | 128 | 0.500 | Synergistic |
| Pore | Bromide | | | | |
| K-12 | Fusidic Acid | 1024 | 256 | 0.375 | Synergistic |
| ΔtolC | Fusidic Acid | 512 | 256 | 0.625 | Additive |
| EKO-35 | Fusidic Acid | 512 | 256 | 0.625 | Additive |
| EKO-35 | Fusidic Acid | 1024 | 256 | 0.500 | Synergistic |
| acrB_{D408A} | | | | | |
| EKO-35 acrB | Fusidic Acid | 512 | 128 | 0.500 | Synergistic |
| EKO-35 acrD | Fusidic Acid | 512 | 256 | 0.563 | Additive |
| EKO-35 acrEF | Fusidic Acid | 512 | 128 | 0.750 | Additive |
| EKO-35 mdtEF | Fusidic Acid | 512 | 128 | 0.375 | Synergistic |
| K-12 Pore | Fusidic Acid | 512 | 128 | 0.500 | Synergistic |
| δtolC Pore | Fusidic Acid | 512 | 128 | 0.750 | Additive |
| EKO-35 Pore | Fusidic Acid | 512 | 256 | 0.620 | Additive |
| EKO-35 | Fusidic Acid | 512 | 128 | 0.750 | Additive |
| acrB_{D408A} Pore | | | | | |
| EKO-35 acrB | Fusidic Acid | 512 | 128 | 0.500 | Synergistic |
| Pore | | | | | |
| EKO-35 acrD | Fusidic Acid | 256 | 128 | 1.000 | — |
| Pore | | | | | |
| EKO-35 acrEF | Fusidic Acid | 512 | 64 | 0.625 | Additive |
| Pore | | | | | |
| EKO-35 mdtEF | Fusidic Acid | 256 | 128 | 0.750 | Additive |
| Pore | | | | | |
| K-12 | Linezolid | 512 | 128 | 0.375 | Synergistic |
| ΔtolC | Linezolid | 512 | 512 | 2.000 | — |
| EKO-35 | Linezolid | 512 | 16 | 0.531 | Additive |
| EKO-35 | Linezolid | 512 | 8 | 0.516 | Additive |
| acrB_{D408A} | | | | | |
| EKO-35 acrB | Linezolid | 256 | 64 | 0.281 | Synergistic |
| K-12 Pore | Linezolid | 512 | 64 | 0.375 | Synergistic |
| ΔtolC Pore | Linezolid | 512 | 256 | 1.000 | — |
| EKO-35 Pore | Linezolid | 512 | 512 | 2.000 | — |
| EKO-35 | Linezolid | 512 | 512 | 2.000 | — |
| acrB_{D408A} Pore | | | | | |
| EKO-35 acrB | Linezolid | 512 | 64 | 0.250 | Synergistic |
| Pore | | | | | |
| K-12 | Oxacillin | 512 | 64 | 0.375 | Synergistic |
| ΔtolC | Oxacillin | 256 | 8 | 0.531 | Additive |
| EKO-35 | Oxacillin | 1024 | 256 | 0.510 | Additive |
| EKO-35 | Oxacillin | 1024 | 1024 | 2.000 | — |
| acrB_{D408A} | | | | | |
| EKO-35 acrB | Oxacillin | 512 | 256 | 0.531 | Additive |
| EKO-35 acrD | Oxacillin | 512 | 256 | 0.750 | Additive |
| EKO-35 acrEF | Oxacillin | 512 | 64 | 0.375 | Synergistic |
| K-12 Pore | Oxacillin | 512 | 8 | 0.266 | Synergistic |
| δtolC Pore | Oxacillin | 512 | 16 | 0.531 | Additive |
| EKO-35 Pore | Oxacillin | 512 | 128 | 0.750 | Additive |
| EKO-35 | Oxacillin | 512 | 512 | 2.000 | — |
| acrB_{D408A} Pore | | | | | |
| EKO-35 acrB | Oxacillin | 512 | 128 | 0.500 | Synergistic |
| Pore | | | | | |
| EKO-35 acrD | Oxacillin | 512 | 256 | 0.750 | Additive |
| Pore | | | | | |
| EKO-35 acrEF | Oxacillin | 512 | 256 | 1.000 | — |
| Pore | | | | | |

TABLE 19B
Defining the Fractional Inhibitory Concentration Index (FICI) for NMP in combination
with different antibiotics using EKO-35 and the efflux platform. The FICI
represents the ΣFIC of each drug. The FIC for each drug was determined by
dividing the MIC of each drug in combination by the MIC of each drug alone. ΣFIC =
FIC_{A} + FIC_{B} = (C_{A}/MIC_{A}) + (C_{B}/MIC_{B}). MIC_{A} and MIC_{B} are the MICs of
drugs A (NMP) and B (antibiotic) alone, respectively. C_{A} and C_{B} are the MICs
of the drugs in combination. Synergy (FICI ≤0.5), indifferent (FICI >1.0),
and additive (FICI >0.5-1.0). Related to FIGS. 5A-5J.

| | | MIC_{b} | MIC_{b} | | |
|---|---|---|---|---|---|
| | | Alone | Combined | | |
| Strain | Compound | (μg/mL) | (μg/mL) | FICI | Effect |
| K-12 | Ciprofloxacin | 0.0313 | 0.0156 | 0.748 | Additive |
| ΔtolC | Ciprofloxacin | 0.0078 | 0.0078 | 2.000 | — |
| EKO-35 | Ciprofloxacin | 0.0078 | 0.0078 | 2.000 | — |
| EKO-35 | Ciprofloxacin | 0.0156 | 0.0078 | 0.625 | Additive |
| acrB_{D408A} | | | | | |
| EKO-35 acrEF | Ciprofloxacin | 0.0313 | 0.0156 | 0.748 | Additive |
| EKO-35 | Ciprofloxacin | 0.0156 | 0.0078 | 0.750 | Additive |
| mexCD | | | | | |
| K-12 Pore | Ciprofloxacin | 0.0156 | 0.0156 | 2.000 | — |
| ΔtolC Pore | Ciprofloxacin | 0.0156 | 0.0039 | 0.750 | Additive |
| EKO-35 Pore | Ciprofloxacin | 0.0078 | 0.0078 | 2.000 | — |
| EKO-35 | Ciprofloxacin | 0.0156 | 0.0078 | 0.508 | Additive |
| acrB_{D408A} Pore | | | | | |
| EKO-35 acrEF | Ciprofloxacin | 0.0078 | 0.0002 | 0.526 | Additive |
| Pore | | | | | |
| EKO-35 | Ciprofloxacin | 0.0078 | 0.0039 | 1.000 | — |
| mexCD Pore | | | | | |
| K-12 | Erythromycin | 128 | 16 | 0.625 | Additive |
| ΔtolC | Erythromycin | 4 | 2 | 1.000 | — |
| EKO-35 | Erythromycin | 2 | 0.25 | 0.375 | Synergistic |
| EKO-35 | Erythromycin | 2 | 0.5 | 0.500 | Synergistic |
| acrB_{D408A} | | | | | |
| EKO-35 acrB | Erythromycin | 128 | 64 | 0.531 | Additive |
| EKO-35 acrEF | Erythromycin | 8 | 8 | 2.000 | — |
| EKO-35 mdtEF | Erythromycin | 64 | 8 | 0.250 | Synergistic |
| EKO-35 | Erythromycin | 16 | 2 | 0.375 | Synergistic |
| mexCD | | | | | |
| K-12 Pore | Erythromycin | 16 | 8 | 1.000 | — |
| ΔtolC Pore | Erythromycin | 4 | 0.5 | 0.625 | Synergistic |
| EKO-35 Pore | Erythromycin | 0.25 | 0.13 | 0.770 | Additive |
| EKO-35 | Erythromycin | 0.13 | 0.063 | 0.735 | Additive |
| acrB_{D408A} Pore | | | | | |
| EKO-35 acrB | Erythromycin | 8 | 0.5 | 0.563 | Additive |
| Pore | | | | | |
| EKO-35 acrEF | Erythromycin | 1 | 0.5 | 0.750 | Additive |
| Pore | | | | | |
| EKO-35 mdtEF | Erythromycin | 8 | 1 | 0.625 | Additive |
| Pore | | | | | |
| EKO-35 | Erythromycin | 2 | 0.13 | 0.565 | Additive |
| mexCD Pore | | | | | |
| K-12 | Ethidium Bromide | 500 | 125 | 0.375 | Synergistic |
| ΔtolC | Ethidium Bromide | 7.81 | 1.95 | 0.281 | Synergistic |
| EKO-35 | Ethidium Bromide | 0.244 | 0.244 | 2.000 | — |
| EKO-35 | Ethidium Bromide | 0.488 | 0.244 | 0.750 | Additive |
| acrB_{D408A} | | | | | |
| EKO-35 acrB | Ethidium Bromide | 15.6 | 2 | 0.253 | Synergistic |
| EKO-35 acrEF | Ethidium Bromide | 2 | 0.5 | 0.500 | Synergistic |
| K-12 Pore | Ethidium Bromide | 250 | 31.3 | 0.375 | Synergistic |
| ΔtolC Pore | Ethidium Bromide | 1.95 | 0.488 | 0.500 | Additive |
| EKO-35 Pore | Ethidium Bromide | 0.488 | 0.244 | 0.508 | Additive |
| EKO-35 | Ethidium Bromide | 0.244 | 0.122 | 1.000 | — |
| acrB_{D408A} Pore | | | | | |
| EKO-35 acrB | Ethidium Bromide | 15.6 | 2 | 0.191 | Synergistic |
| Pore | | | | | |
| EKO-35 acrEF | Ethidium Bromide | 2 | 0.5 | 0.500 | Synergistic |
| Pore | | | | | |
| K-12 | Fusidic Acid | 1024 | 128 | 0.375 | Synergistic |
| ΔtolC | Fusidic Acid | 4 | 0.5 | 0.625 | Additive |
| EKO-35 | Fusidic Acid | 4 | 0.5 | 0.625 | Additive |
| EKO-35 | Fusidic Acid | 4 | 1 | 0.500 | Synergistic |
| acrB_{D408A} | | | | | |
| EKO-35 acrB | Fusidic Acid | 1024 | 256 | 0.500 | Synergistic |
| EKO-35 acrD | Fusidic Acid | 256 | 16 | 0.563 | Additive |
| EKO-35 acrEF | Fusidic Acid | 32 | 16 | 0.750 | Additive |
| EKO-35 mdtEF | Fusidic Acid | 64 | 8 | 0.375 | Synergistic |
| K-12 Pore | Fusidic Acid | 512 | 128 | 0.500 | Synergistic |
| ΔtolC Pore | Fusidic Acid | 2 | 1 | 0.750 | Additive |
| EKO-35 Pore | Fusidic Acid | 0.5 | 0.06 | 0.620 | Additive |
| EKO-35 | Fusidic Acid | 0.5 | 0.25 | 0.750 | Additive |
| acrB_{D408A} Pore | | | | | |
| EKO-35 acrB | Fusidic Acid | 512 | 128 | 0.500 | Synergistic |
| Pore | | | | | |
| EKO-35 acrD | Fusidic Acid | 64 | 32 | 1.000 | — |
| Pore | | | | | |
| EKO-35 acrEF | Fusidic Acid | 2 | 1 | 0.625 | Additive |
| Pore | | | | | |
| EKO-35 mdtEF | Fusidic Acid | 8 | 2 | 0.750 | Additive |
| Pore | | | | | |
| K-12 | Linezolid | 256 | 32 | 0.375 | Synergistic |
| ΔtolC | Linezolid | 8 | 8 | 2.000 | — |
| EKO-35 | Linezolid | 16 | 8 | 0.531 | Additive |
| EKO-35 | Linezolid | 16 | 8 | 0.516 | Additive |
| acrB_{D408A} | | | | | |
| EKO-35 acrB | Linezolid | 256 | 8 | 0.281 | Synergistic |
| K-12 Pore | Linezolid | 128 | 32 | 0.375 | Synergistic |
| δtolC Pore | Linezolid | 8 | 4 | 1.000 | — |
| EKO-35 Pore | Linezolid | 8 | 8 | 2.000 | — |
| EKO-35 | Linezolid | 8 | 8 | 2.000 | — |
| acrB_{D408A} Pore | | | | | |
| EKO-35 acrB | Linezolid | 128 | 16 | 0.250 | Synergistic |
| Pore | | | | | |
| K-12 | Oxacillin | 512 | 128 | 0.375 | Synergistic |
| ΔtolC | Oxacillin | 1 | 0.5 | 0.531 | Additive |
| EKO-35 | Oxacillin | 0.5 | 0.13 | 0.510 | Additive |
| EKO-35 | Oxacillin | 0.13 | 0.13 | 2.000 | — |
| acrB_{D408A} | | | | | |
| EKO-35 acrB | Oxacillin | 512 | 16 | 0.531 | Additive |
| EKO-35 acrD | Oxacillin | 128 | 32 | 0.750 | Additive |
| EKO-35 acrEF | Oxacillin | 256 | 64 | 0.375 | Synergistic |
| K-12 Pore | Oxacillin | 64 | 16 | 0.266 | Synergistic |
| ΔtolC Pore | Oxacillin | 1 | 0.5 | 0.531 | Additive |
| EKO-35 Pore | Oxacillin | 0.5 | 0.25 | 0.750 | Additive |
| EKO-35 | Oxacillin | 0.13 | 0.13 | 2.000 | — |
| acrB_{D408A} Pore | | | | | |
| EKO-35 acrB | Oxacillin | 64 | 16 | 0.500 | Synergistic |
| Pore | | | | | |
| EKO-35 acrD | Oxacillin | 2 | 0.5 | 0.750 | Additive |
| Pore | | | | | |
| EKO-35 acrEF | Oxacillin | 2 | 1 | 1.000 | — |
| Pore | | | | | |

TABLE 20
Assessing efflux pump interplay using EKO-35 and the efflux platform. MIC values
were calculated by averaging the OD_{600 nm} values of three biological replicates
and identifying the highest concentration of drug for which the OD_{600 nm} value
>0.100. The fold changes between EKO-35 and each efflux pump expressing
strain were calculated by dividing the MIC value of each strain by that of
EKO-35. Fold increases in resistance 4-fold and above are bolded.

| | | | | Fold | | |
|---|---|---|---|---|---|---|
| | | | | Change | Interplay | |
| Compound | Strain | Pore | MIC | from EKO-35 | effect | P-Value |
| Acriflavine | EKO-35 | − | 0.098 | − | − | 1.75 × 10⁻⁶ |
| | EKO-35 | | 0.781 | 8 | | |
| | pEmrE | | | | | |
| | EKO-35 | + | 0.049 | − | − | |
| | EKO-35 | | 0.781 | 16 | | 7.20 × 10⁻⁶⁴ |
| | pEmrE | | | | | |
| | acrB | − | 1.563 | 16 | Multiplicative | |
| | acrB | | 25 | 256 | | 1.75 × 10⁻⁶ |
| | pEmrE | | | | | |
| | acrB | + | 0.781 | 16 | Multiplicative | |
| | acrB | | 12.5 | 256 | | 2.01 × 10⁻² |
| | pEmrE | | | | | |
| | acrEF | − | 0.781 | 8 | Multiplicative | |
| | acrEF | | 12.5 | 128 | | 2.23 × 10⁻² |
| | pEmrE | | | | | |
| | acrEF | + | 0.781 | 16 | Multiplicative | |
| | acrEF | | 6.25 | 128 | | 9.79 × 10⁻⁶⁴ |
| | pEmrE | | | | | |
| | acrD | − | 0.098 | 1 | Multiplicative | |
| | acrD | | 1.563 | 16 | | 1.60 × 10⁻⁶ |
| | pEmrE | | | | | |
| | acrD | + | 0.098 | 2 | − | |
| | acrD | | 0.781 | 16 | | 9.79 × 10⁻⁶⁴ |
| | pEmrE | | | | | |
| | mdtEF | − | 0.098 | 1 | Multiplicative | |
| | mdtEF | | 1.563 | 16 | | 7.26 × 10⁻⁶⁴ |
| | pEmrE | | | | | |
| | mdtEF | + | 0.195 | 4 | Multiplicative | |
| | mdtEF | | 1.563 | 32 | | 1.60 × 10⁻⁶ |
| | pEmrE | | | | | |
| Ethidium | EKO-35 | − | 0.122 | − | − | |
| Bromide | EKO-35 | | 0.488 | 4 | | 4.52 × 10⁻⁵ |
| | pEmrE | | | | | |
| | EKO-35 | + | 0.061 | − | − | |
| | EKO-35 | | 0.244 | 4 | | 2.45 × 10⁻³¹ |
| | pEmrE | | | | | |
| | acrB | − | 7.813 | 64 | Multiplicative | |
| | acrB | | 31.25 | 256 | | 3.14 × 10⁻² |
| | pEmrE | | | | | |
| | acrB | + | 3.91 | 64 | Multiplicative | |
| | acrB | | 15.6 | 256 | | 4.52 × 10⁻⁵ |
| | pEmrE | | | | | |
| | acrEF | − | 1.953 | 16 | Multiplicative | |
| | acrEF | | 7.813 | 64 | | 4.52 × 10⁻⁵ |
| | pEmrE | | | | | |
| | acrEF | + | 0.977 | 16 | Multiplicative | |
| | acrEF | | 3.91 | 64 | | 1.32 × 10⁻³ |
| | pEmrE | | | | | |
| | acrD | − | 0.244 | 2 | Multiplicative | |
| | acrD | | 1.953 | 16 | | 2.86 × 10⁻² |
| | pEmrE | | | | | |
| | acrD | + | 0.061 | 1 | Multiplicative | |
| | acrD | | 0.488 | 8 | | 3.69 × 10⁻⁵ |
| | pEmrE | | | | | |
| | mdtEF | − | 0.977 | 8 | Multiplicative | |
| | mdtEF | | 3.906 | 32 | | 3.69 × 10⁻⁵ |
| | pEmrE | | | | | |
| | mdtEF | + | 0.488 | 8 | Multiplicative | |
| | mdtEF | | 1.95 | 32 | | 3.14 × 10⁻² |
| | pEmrE | | | | | |
| Novobiocin | EKO-35 | − | 0.781 | − | − | |
| | EKO-35 | | 0.781 | 1 | | 1.00 × 10⁰ |
| | pEmrE | | | | | |
| | EKO-35 | + | 0.391 | − | − | |
| | EKO-35 | | 0.391 | 1 | | 1.00 × 10⁰ |
| | pEmrE | | | | | |
| | acrB | − | 400 | 512 | − | |
| | acrB | | 400 | 512 | | 7.25 × 10⁻¹ |
| | pEmrE | | | | | |
| | acrB | + | 100 | 256 | | |
| | acrB | | 100 | 256 | | 1.32 × 10⁻¹ |
| | pEmrE | | | | | |
| | acrEF | − | 100 | 128 | − | |
| | acrEF | | 50 | 64 | | 1.16 × 10⁻¹ |
| | pEmrE | | | | | |
| | acrEF | + | 12.5 | 32 | − | |
| | acrEF | | 12.5 | 32 | | 1.00 × 10⁰ |
| | pEmrE | | | | | |
| | acrD | − | 100 | 128 | − | |
| | acrD | | 50 | 64 | | 5.50 × 10⁻² |
| | pEmrE | | | | | |
| | acrD | + | 25 | 64 | − | |
| | acrD | | 6.25 | 16 | | 5.50 × 10⁻² |
| | pEmrE | | | | | |
| | mdtEF | − | 12.5 | 16 | − | |
| | mdtEF | | 6.25 | 8 | | 3.74 × 10⁻¹ |
| | pEmrE | | | | | |
| | mdtEF | + | 3.13 | 8 | − | |
| | mdtEF | | 1.56 | 4 | | 1.48 × 10⁻¹ |
| | pEmrE | | | | | |
| Minocycline | EKO-35 | − | 1.25 | − | − | |
| | EKO-35 | | 1.25 | 1 | | 1.00 × 10⁰ |
| | pEmrE | | | | | |
| | EKO-35 | + | 0.63 | − | | |
| | EKO-35 | | 0.63 | 1 | | 3.72 × 10⁻¹ |
| | pEmrE | | | | | |
| | acrB | − | 5 | 4 | − | |
| | acrB | | 5 | 4 | | 1.00 × 10⁰ |
| | pEmrE | | | | | |
| | acrB | + | 2.5 | 4 | − | |
| | acrB | | 2.5 | 4 | | 3.74 × 10⁻¹ |
| | pEmrE | | | | | |
| | acrEF | − | 2.5 | 2 | − | |
| | acrEF | | 5.0 | 4 | | 3.74 × 10⁻¹ |
| | pEmrE | | | | | |
| | acrEF | + | 1.25 | 2 | − | |
| | acrEF | | 1.25 | 2 | | 1.00 × 10⁰ |
| | pEmrE | | | | | |
| | acrD | − | 2.5 | 2 | − | |
| | acrD | | 2.5 | 2 | | 1.00 × 10⁰ |
| | pEmrE | | | | | |
| | acrD | + | 1.25 | 2 | − | |
| | acrD | | 1.25 | 2 | | 3.98 × 10⁻¹ |
| | pEmrE | | | | | |
| | mdtEF | − | 2.5 | 2 | − | |
| | mdtEF | | 2.5 | 2 | | 1.00 × 10⁰ |
| | pEmrE | | | | | |
| | mdtEF | + | 1.25 | 2 | − | |
| | mdtEF | | 1.25 | 2 | | 1.28 × 10⁻¹ |
| | pEmrE | | | | | |

### Example 2. Development and Utilization of EKO-35v2

### Materials and Methods

### Strains, Plasmids, and Growth Conditions

[0248] Bacterial strains and plasmids used in this Example are provided in Table 21. E. coli K-12 str. BW25113, the parental strain of the Keio Collection (Baba, T. et al., 2006) was used as the background for generation of EKO-35v2. E. coli TOP10 or E. coli DH5a strains were used as routine cloning hosts. Plasmids for CRISPR-Cas9 mediated counterselection, pCas and pTargetF, were purchased from Addgene (Jiang, Y. et al., 2015). Strains were routinely grown in Lysogeny broth (LB) (Bioshop) at 37° C. or 30° C. For optimal aeration, broth cultures were grown with aeration at 220 rpm. For growth profiling, microtiter plates were incubated at 37° C. with continuous linear shaking at 600 rpm. Ampicillin (100 μg/mL) (Bioshop), kanamycin (50 μg/mL) (Sigma-Aldrich), spectinomycin (50 μg/mL) (Bioshop), and gentamicin (10 μg/mL) (BioBasic) were used at the listed concentrations for selection of resistance markers.

TABLE 21
Strains and plasmids used in this Example.

| | |
|---|---|
| Genotype or Description | Source |

Strains

| | | |
|---|---|---|
| E. coli K-12 str. | The parental strain of the KEIO collection | Baba, T. et |
| BW25113 | | al. (2006) |
| E. coli TOP10 | Cloning host, mcrA deficient for increased | Thermo |
| | efficiency in foreign DNA uptake | Fisher |
| | | Scientific |
| E. coli DH5α | Cloning host, endA deficient for high quality | Thermo |
| | DNA preparations | Fisher |
| | | Scientific |
| E. coli EKO-35v2 | BW25113 efflux deficient derivative (AacrB; | This |
| | acrD; acrF; mdtF; macB; emrB; mdtL; mdtK; | disclosure |
| | bcr; ydeA; mdtM; yddA; yebQ; emrE; mdtD; | |
| | sugE; ynfM; emrD; ydeF; mdtJ; ydiM; mdtB; | |
| | mdIA; emrY; mdfA; fsr; mdtG; mdtH; yieO; | |
| | mdlB, mdtO, yojI, yajR, ydhC; cusA) | |

Plasmids

| | | |
|---|---|---|
| pCas | Kan^{r}, temperature sensitive permissive (30° C.), | Jiang, Y. et |
| | non-permissive (37° C.), arabinose-induced | al. (2015) |
| | expression of the λ-Red recombinase for | |
| | homologous recombination. Constitutive | |
| | expression of Cas-9 | |
| pTargetF | Spec^{r}, modifiable by PCR to contain N20 | Jiang, Y. et |
| | sequence recognizable by Cas-9 | al. (2015) |
| pTargetF-mdtD- | Spec^{r}, modified by PCR to contain an N20 | |
| sugE | sequence recognizable by Cas-9 to target a | |
| | PAM site within mdtD and sugE | |
| pTargetF-ynfM- | Spec^{r}, modified by PCR to contain an N20 | |
| emrD-ydeF | sequence recognizable by Cas-9 to target a | |
| | PAM site within ynfM, emrD, and ydeF | |
| pTargetF-mdIA- | Spec^{r}, modified by PCR to contain an N20 | |
| emrY | sequence recognizable by Cas-9 to target a | |
| | PAM site within mdlA and emrY | |
| pTargetF-bcr-mdtK | Spec^{r}, modified by PCR to contain an N20 | |
| | sequence recognizable by Cas-9 to target a | |
| | PAM site within bcr and mdtK | |
| pTargetF-mdIB- | Spec^{r}, modified by PCR to contain an N20 | |
| mdtH | sequence recognizable by Cas-9 to target a | |
| | PAM site within mdlB and mdtH | |
| pTargetF-macB- | Spec^{r}, modified by PCR to contain an N20 | |
| yddA | sequence recognizable by Cas-9 to target a | |
| | PAM site within macB and yddA | |
| pTargetF-emrE | Spec^{r}, modified by PCR to contain an N20 | This |
| | sequence recognizable by Cas-9 to target a | disclosure |
| | PAM site within emrE | |
| pTargetF-mdtJ | Spec^{r}, modified by PCR to contain an N20 | This |
| | sequence recognizable by Cas-9 to target a | disclosure |
| | PAM site within mdtIJ | |
| pTargetF-ydiM | Spec^{r}, modified by PCR to contain an N20 | This |
| | sequence recognizable by Cas-9 to target a | disclosure |
| | PAM site within ydiM | |
| pTargetF-mdtB | Spec^{r}, modified by PCR to contain an N20 | This |
| | sequence recognizable by Cas-9 to target a | disclosure |
| | PAM site within mdtB | |
| pTargetF-mdfA | Spec^{r}, modified by PCR to contain an N20 | This |
| | sequence recognizable by Cas-9 to target a | disclosure |
| | PAM site within mdfA | |
| pTargetF-fsr | Spec^{r}, modified by PCR to contain an N20 | This |
| | sequence recognizable by Cas-9 to target a | disclosure |
| | PAM site within fsr | |
| pTargetF-mdtG | Spec^{r}, modified by PCR to contain an N20 | This |
| | sequence recognizable by Cas-9 to target a | disclosure |
| | PAM site within mdtG | |
| pTargetF-yieO | Spec^{r}, modified by PCR to contain an N20 | This |
| | sequence recognizable by Cas-9 to target a | disclosure |
| | PAM site within yieO | |
| pTargetF-mdtO | Spec^{r}, modified by PCR to contain an N20 | This |
| | sequence recognizable by Cas-9 to target a | disclosure |
| | PAM site within mdtO | |
| pTargetF-yojI | Spec^{r}, modified by PCR to contain an N20 | This |
| | sequence recognizable by Cas-9 to target a | disclosure |
| | PAM site within yojI | |
| pTargetF-yajR | Spec^{r}, modified by PCR to contain an N20 | This |
| | sequence recognizable by Cas-9 to target a | disclosure |
| | PAM site within yajR | |
| pTargetF-ydhC | Spec^{r}, modified by PCR to contain an N20 | This |
| | sequence recognizable by Cas-9 to target a | disclosure |
| | PAM site within ydhC | |
| pTargetF-cusA | Spec^{r}, modified by PCR to contain an N20 | This |
| | sequence recognizable by Cas-9 to target a | disclosure |
| | PAM site within cusA | |
| pTargetF-acrB | Spec^{r}, modified by PCR to contain an N20 | |
| | sequence recognizable by Cas-9 to target a | |
| | PAM site within acrB | |
| pTargetF-acrD | Spec^{r}, modified by PCR to contain an N20 | |
| | sequence recognizable by Cas-9 to target a | |
| | PAM site within acrD | |
| pTargetF-acrF | Spec^{r}, modified by PCR to contain an N20 | |
| | sequence recognizable by Cas-9 to target a | |
| | PAM site within acrF | |
| pTargetF-mdtF | Spec^{r}, modified by PCR to contain an N20 | |
| | sequence recognizable by Cas-9 to target a | |
| | PAM site within mdtF | |
| pTargetF-emrB | Spec^{r}, modified by PCR to contain an N20 | |
| | sequence recognizable by Cas-9 to target a | |
| | PAM site within emrB | |
| pTargetF-ydeA | Spec^{r}, modified by PCR to contain an N20 | |
| | sequence recognizable by Cas-9 to target a | |
| | PAM site within ydeA | |
| pTargetF-mdtM | Spec^{r}, modified by PCR to contain an N20 | |
| | sequence recognizable by Cas-9 to target a | |
| | PAM site within mdtM | |
| pTargetF-yddA | Spec^{r}, modified by PCR to contain an N20 | |
| | sequence recognizable by Cas-9 to target a | |
| | PAM site within yddA | |
| pTargetF-yebQ | Spec^{r}, modified by PCR to contain an N20 | |
| | sequence recognizable by Cas-9 to target a | |
| | PAM site within yebQ | |

### Generation of an Efflux Deficient Strain

[0249] Generation of EKO-35 was achieved using a CRISPR-Cas9 counter-selection (Jiang, Y. et al., 2015). The efflux genes were inactivated in the order denoted in Table 22. All PCR reactions and restriction enzyme digests were prepared according to manufacturers' guidelines. Amplicons were purified using a GeneJET PCR purification kit (Thermo Fisher Scientific) according to manufacturer's guidelines. The 2×GB-AMP™ high-fidelity PaCeR™ polymerase Master Mix (GeneBio Systems Inc) and Taq 2× polymerase Master Mix (FroggaBio) were used according to the manufacturer's suggested guidelines.

[0250] For CRISPR-Cas9-mediated counterselection, the methodology described by Jiang et al. was modified for high-throughput screening of mutants (Jiang, Y. et al., 2015). Multiple efflux-encoding genes were targeted simultaneously by multiplexing two or three guide RNAs in the pTargetF vector. CRISPR guide software (Benchling) was employed for selection of appropriate N20 sequences. pTargetF was modified via PCR to introduce an N20 for the gene of interest (Table 23). Amplicon size (2100 bp) was verified via gel electrophoresis, and the remaining PCR product was purified. A second N20 sequence was amplified using PaCeR™ polymerase and inserted into pTargetF-gene1 vector through restriction digest with EcoR1 and XhoI and ligation with T4 ligase. A third N20 sequence was amplified using PaCeR™ polymerase and inserted into pTargetF-gene1-gene2 vector through restriction digest with XbaI and HindIII and ligation with T4 ligase. pTargetF vectors were verified using Sanger Sequencing at the Advanced Analysis Centre (AAC) University of Guelph. To enable rapid screening of positive mutants and to disrupt the target gene, ssDNA repair oligos (˜100 bp in length) were designed to contain an AseI restriction site and three tandem stop codons (Table 23). All ssDNA repair oligos were purchased through Integrated DNA Technologies (IDT). Electrocompetent cells of the mutant strain of interest were transformed with 50 ng of pCas. A broth culture of each strain was grown to the mid exponential phase (OD600 nm˜0.5) in the presence of kanamycin and 10 mM arabinose to induce recombinase expression. To recombinase induced electrocompetent cells, 100 ng of pTargetF that was modified to contain the desired N20 sequence, and 2000 ng of repair ssDNA targeting the gene of interest were electroporated (Bio-Rad MicroPulser, Ec1 setting, 1 mm electroporation cuvette (Fisher)). The cultures were recovered in LB with 1 mM arabinose at 30° C. and propagated on selective agar (LB with kanamycin and spectinomycin) to identify successful gene disruptions. For high-throughput screening of colonies, Taq polymerase was used with primers annealing to the target region of each gene (Table 23). The amplicons were digested with AseI and successfully inactivated genes were identified via gel electrophoresis by digestion relative to a wild-type negative control. Insertion of the three tandem stop codons into the gene of interest was verified using Sanger sequencing at the Advanced Analysis Centre (AAC) (University of Guelph). Genes disrupted using CRISPR-Cas9-mediated counter selection are indicated in Table 22.

TABLE 22
Gene inactivation during the generation of EKO-35v2. For genes
inactivated using CRISPR-Cas9 mediated counter selection,
the location of the inserted stop codons are noted. Genes
are listed in the order in which they were inactivated.

| Gene | Gene Size (bp) | Stop Codon Placement (bp) |
|---|---|---|
| yajR | 1365 | 47 |
| mdtO | 2052 | 75 |
| ydhC | 1212 | 90 |
| emrE | 333 | 93 |
| yojI | 1644 | 25 |
| mdtD | 1416 | 26 |
| sugE | 318 | 93 |
| ynfM | 1254 | 115 |
| emrD | 1185 | 206 |
| ydeF | 1188 | 43 |
| mdlA | 1773 | 69 |
| emrY | 1539 | 41 |
| mdtK | 1374 | 135* |
| bcr | 1191 | 48* |
| mdtG | 1227 | 276 |
| mdtH | 1209 | 136 |
| mdlB | 1782 | 72 |
| macB | 1947 | 51* |
| yddA | 1686 | 105* |
| fsr | 1221 | 242 |
| ydiM | 1215 | 124 |
| yieO | 1428 | 177 |
| mdfA | 1233 | 116 |
| mdtM | 1233 | 48* |
| mdtJ | 366 | 98 |
| emrB | 1539 | 108* |
| mdtB | 3123 | 160 |
| mdtL | 1176 | 51* |
| yebQ | 1374 | 27* |
| cusA | 3144 | 400 |
| mdtF | 3114 | 72* |
| ydeA | 1191 | 142* |
| acrF | 3105 | 42* |
| acrD | 3114 | 45* |
| acrB | 3150 | 66* |

*indicates genes previously disrupted using λ-Red recombineering in EKO-35 of Example 1 (i.e. EKO-35v1).

TABLE 23
Primers and oligonucleotides used in this Example.

| | | SEQ ID |
|---|---|---|
| Primer | Sequence (5′-3′) | NO: |
| AcrB Seq Up | CTGAAACAAGAGAACGGCAAAGGC | 1 |
| AcrB Seq Low | CTTACTGACCTGGACTTGCCCTCTCG | 2 |
| AcrB_N20_Fwd | GATCGCCATTATCATCATGTGTTTTAGAGCTAGAAATAGCAAG | 302 |
| AcrB_N20_Rvs | ACATGATGATAATGGCGATCACTAGTATTATACCTAGGACTGAG | 303 |
| AcrB SSDNA | TTG CGC CAC CGG CAG TTT GAG GAT CGC TTA TTA | 304 |
| Repair | TTA ATT TAA CAT GAT GAT AAT GGC GAT CAC CCA | |
| | CGC AAA AAT CGG GCG ATC GAT AAA GAA ATT AGG | |
| | CAT | |
| AcrD Seq Up | CGCTGACTTTTTCACAACCTTCCG | 5 |
| AcrD Seq Low | GTCCCCCGGAGGTAGTCATCGCAGC | 6 |
| AcrD_N20_Fwd | CCAGCACCCAGGCAAAAATGGTTTTAGAGCTAGAAATAGCAAG | 305 |
| AcrD_N20_Rvs | CATTTTTGCCTGGGTGCTGGACTAGTATTATACCTAGGACTGAG | 306 |
| AcrD SSDNA | TTG TTC AAC GGG CAA TGA AAA AAT CGC CAG GGT | 307 |
| Repair | ACC TGT CAG TTA TTA TTA ATT CAG CAC CCA GGC | |
| | AAA AAT TCG ATC AAT AAA GAA ATT CGC CAT | |
| AcrF Seq Up | GAGGCTGAAGCAATCCGTAGAGC | 9 |
| AcrD Seq Low | GATACTGTATCGTTAAAAAGAGCGCG | 10 |
| AcrF_N20_Fwd | TCGACGACCGATATTTGCATGTTTTAGAGCTAGAAATAGCAAG | 308 |
| AcrF_N20_Rvs | ATGCAAATATCGGTCGTCGAACTAGTATTATACCTAGGACTGAG | 309 |
| AcrF SSDNA | CTG AGC GAC GGG CAA TTG TAG GAT CGC CAG TGC | 310 |
| Repair | GCC CGC CAT CAT CAG AAT TTA TTA TTA ATT TCA | |
| | TGC AAA TAT CGG TCG TCG AAT AAA AAA GTT TGC | |
| | CAT | |
| MdtF 200 Up | GATGTCGTGCAGCTACGCGAAAT | 13 |
| MdtF 200 Low | ACGAATGGCTGGAGTGGTTTC | 14 |
| MdtF_N20_Fwd | ATTATTATGATGCTTGCAGGGTTTTAGAGCTAGAAATAGCAAG | 311 |
| MdtF_N20_Rvs | CCTGCAAGCATCATAATAATACTAGTATTATACCTAGGACTGAG | 312 |
| MdtF SSDNA | AAT CTG CGG ATA CTG CGC AAC CGG TAA GTT CAT | 313 |
| Repair | TTA TTA TTA ATT ACC TGC AAG CAT CAT AAT AAT | |
| | GGC AAG TAC CCA GGC AAA AAC CGG GCG ATC AAT | |
| | AAA ATA | |
| MacB 200 Up | ATGTGCTGACGATCCCTCTGTC | 17 |
| MacB 200 Low | TTCGCTCATTATTCCACCATTCAG | 18 |
| MacB_N20_Fwd | ATTCGTCGCAGCTATCCTGCGTTTTAGAGCTAGAAATAGCAAG | 314 |
| MacB_N20_Rvs | GCAGGATAGCTGCGACGAATACTAGTATTATACCTAGGACTGAG | 315 |
| MacB SSDNA | ACC CGC ATA AAT ATC GAG GCT GAT GCC CTT CAG | 316 |
| Repair | CAC CTC AAC TTA TTA TTA ATT GGC AGG ATA GCT | |
| | GCG ACG AAT ATC CTT TAA TTC GAG CAA AGG CGT | |
| | CAT | |
| EmrB 200 Up | CGTTCAGCGTCTGCCTGTGCG | 21 |
| EmrB 200 Low | GCGGCAATGGAAGACGTGCTG | 22 |
| EmrB_N20_Fwd | GGACTCCACCATTGCTAACGGTTTTAGAGCTAGAAATAGCAAG | 317 |
| EmrB_N20_Rvs | CGTTAGCAATGGTGGAGTCCACTAGTATTATACCTAGGACTGAG | 318 |
| EmrB SSDNA | CTG GCT GAG CGA TGA GCC CAG ATT CCC GGC GAT | 319 |
| Repair | TTA TTA TTA ATT AAC GTT AGC AAT GGT GGA GTC | |
| | CAG CAC CTG CAT GAA TGT CGC CAG TGA CAG CGC | |
| | AAT CGT | |
| MdtL 200 Up | CATTCTCTTTGGTATAACCGTG | 25 |
| MdtL 200 Low | TTTGCTCCATGCTGACCAT | 26 |
| MdtL_N20_Fwd | GGCGGGATAAAGTAAAACCAGTTTTAGAGCTAGAAATAGCAAG | 320 |
| MdtL_N20_Rvs | TGGTTTTACTTTATCCCGCCACTAGTATTATACCTAGGACTGAG | 321 |
| MdtL SSDNA | ATT GAG ATC GGC GGC GAT GCG CGG TAA ACC AAC | 322 |
| Repair | GAG GTA TTA TTA TTA ATT GGC GGG ATA AAG TAA | |
| | AAC CAG AAA ACT ACA AAT CAA AAA GCG GGA CAT | |
| MdtK 200 Up | GAAATCAGTTAAGACATTCTGTTC | 29 |
| MdtK 200 Low | CATGTGCAACTGAAAGTGAAAC | 30 |
| MdtK_N20_Fwd | CTATAGTGCCACCGACATGGGTTTTAGAGCTAGAAATAGCAAG | 323 |
| MdtK_N20_Rvs | CCATGTCGGTGGCACTATAGACTAGTATTATACCTAGGACTGAG | 324 |
| MdtK SSDNA | ACC AAA GAG GAT CGC CGG AAG CCA GAT AGA AGT | 325 |
| Repair | ACC TTA TTA TTA ATT CAT GTC GGT GGC ACT ATA | |
| | GCC GCC CGC CAT CAC GGT ATC GAC AAA ACC CAT | |
| | CGC | |
| Bcr 200 Up | CCTCTATGGCTCTGATTTAAGTA | 33 |
| Bcr 200 Low | GTTATCATCAGGTGAAACGCAT | 34 |
| Bcr_N20_Fwd | AATCGACAGCGGCATCAACAGTTTTAGAGCTAGAAATAGCAAG | 326 |
| Bcr_N20_Rvs | TGTTGATGCCGCTGTCGATTACTAGTATTATACCTAGGACTGAG | 327 |
| Bcr ssDNA Repair | CGG TAG CGC GGG CAG ATA CAT ATC AAT CGA CAG | 328 |
| | CGG CAT CAA CAT TTA TTA TTA ATT AAG GAT AAA | |
| | AAC AAT AGC AAA CGA CGA ATG CTG TCG GGT GGT | |
| | CAC | |
| YdeA 150 Fwd | CCGTGATGTTACCGACTCTC | 329 |
| YdeA 150 Rvs | GTGGCATTGAAGCGATCTCC | 330 |
| YdeA_N20_Fwd | CAACATGATGCCGACCTGAGGTTTTAGAGCTAGAAATAGCAAG | 331 |
| YdeA_N20_Rvs | CTCAGGTCGGCATCATGTTGACTAGTATTATACCTAGGACTGAG | 332 |
| YdeA SSDNA | CAT TAG CGC TAC TAC CCA TGC GTA AAT GGT CAA | 333 |
| Repair | CAT GAT GCC GAC CTG AGC TTA TTA TTA ATT TTG | |
| | CAT GTG AAA ACT TTG CGC AAT GTC AGA GAG CAG | |
| | GCC AAC AGG GAC | |
| MdtM 250 Up | CAGCGTAACGACAAAGGTAGCAG | 41 |
| MdtM 200 Low | ACCACCGCAAACCAGTC | 42 |
| MdtM_N20_Fwd | CATCGGGAAAAACAGCGTGGGTTTTAGAGCTAGAAATAGCAAG | 334 |
| MdtM_N20_Rvs | CCACGCTGTTTTTCCCGATGACTAGTATTATACCTAGGACTGAG | 335 |
| MdtM SSDNA | CTG GAT CAG ATC CGT CGA CAG ATA CGC AGC AAA | 336 |
| Repair | GTC ATA TTA TTA TTA ATT CAT CGG GAA AAA CAG | |
| | CGT GGC ATG GCG GGT AAA AAA ACG TGG CAT | |
| YddA 250 Up | TGTCGGGTGTTTCGTCAT | 45 |
| YddA 250 Low | TCGCTGATATTGCCATTC | 46 |
| YddA_N20_Fwd | CCACGCCAAGGATCATGGCGGTTTTAGAGCTAGAAATAGCAAG | 337 |
| YddA_N20_Rvs | CGCCATGATCCTTGGCGTGGACTAGTATTATACCTAGGACTGAG | 338 |
| YddA SSDNA | GTC GTT TAA CCA GAC CTG AAT TTT AAC CAC GCC | 339 |
| Repair | AAG GAT CAT GGC GAG TTA TTA TTA ATT TAA CAA | |
| | CAC TGA AGT TTT ATT ATT CTT ACG CAG CCA AAA | |
| | GGG CTT | |
| YebQ 200 Up | CACGGAAGATACAGAATCAGG | 49 |
| YebQ 200 Low | CAGCTATGAACCGCAAGAA | 50 |
| YebQ_N20_Fwd | AATATCGCACCGTATCGCTGGTTTTAGAGCTAGAAATAGCAAG | 340 |
| YebQ_N20_Rvs | CAGCGATACGGTGCGATATTACTAGTATTATACCTAGGACTGAG | 341 |
| YebQ SSDNA | AAT ACC AAT CAC AAT GGT TAA TAT CGC ACC GTA | 342 |
| Repair | TCG CTG TTA TTA TTA ATT GCC GTC GGC CTG AAC | |
| | TTT TGG CAT AGG AAT TTT ATA TCT TTG GTG AAT | |
| | AAT | |
| EmrE N20 Up | AGTTTTCAGAAGGTTTTACAGTTTTAGAGCTAGAAATAGCAAG | 51 |
| EmrE N20 Low | TGTAAAACCTTCTGAAAACTACTAGTATTATACCTAGGACTGAG | 52 |
| EmrE SSDNA | ATA ACA AAT AAT TGT ACC AAC AGA TGG CCA TAA | 53 |
| Repair | TTA TTA TTA ATT TGT AAA ACC TTC TGA AAA CTT | |
| | CAT TAA GGT TGT ACC AAT GAC CTT TAT TAT TAC | |
| | TGC | |
| EmrE 200 Up | CGGTTCGCTACCAGAGAAGAATG | 54 |
| EmrE 200 Low | CATGGTGACACCTGCTAACGTATGC | 55 |
| MdtD N20 Up | CCACAATCCACAATTGCCAAGTTTTAGAGCTAGAAATAGCAAG | 56 |
| MdtD N20 Low | TTGGCAATTGTGGATTGTGGACTAGTATTATACCTAGGACTGAG | 57 |
| MdtD SSDNA | TG TCC AGC GAC TGC ATA AAG AAG CCG AAA GCC ACA | 58 |
| Repair | ATC CAC AAT TGC CAA TTA TTA TTA ATT GGT GCT | |
| | GTC GGG AAG ATC TGT CAT TTA CTC GGT TAC CGT | |
| | TTG TTT AGG TT | |
| MdtD 200 Up | CGCCCGATTATGATGACTAC | 59 |
| MdtD 200 Low | CTGAAAGACAAAGCGATCATTG | 60 |
| SugE N20 Up | CGTCAAACGACTAAAGCCGTGTTTTAGAGCTAGAAATAGCAAG | 61 |
| SugE N20 Low | CGTCAAACGACTAAAGCCGTACTAGTATTATACCTAGGACTGAG | 62 |
| SugE SSDNA | GAC AAT CAT CGC CGT CAC AGT AAT AAC ACT CGG | 63 |
| Repair | CGT CAA ACG ACT AAA GCC GTG TTA TTA TTA ATT | |
| | ATA TTT CAG GCC AAC GGC CCA TAC CAC TTC CAG | |
| | CAG ACC AGC AAT AAC TAA GAT | |
| SugE 200 Up | CGCAGCAACGAAAGCGCA | 64 |
| YnfM N20 Up | TCCGGCAGAGAACAGCGCCAGTTTTAGAGCTAGAAATAGCAAG | 65 |
| YnfM N20 Low | TGGCGCTGTTCTCTGCCGGAACTAGTATTATACCTAGGACTGAG | 66 |
| YnfM SSDNA | CTG CAC ACA ATA GAG AAG TGC AAA TGT TGC CAG | 67 |
| Repair | TCC GGC AGA GAA CAG CGC CAG TTA TTA TTA ATT | |
| | GAC GCG CAT AAA TTG CGG CGT ACC GCG TTT AAT | |
| | AAA TTG ATT TGG CTG AGA AAT | |
| YnfM 200 Up | GTTGCGAAATATTCAGGC | 68 |
| YnfM 200 Low | AAAGCAGTAGAATAACTGC | 69 |
| EmrD N20 Up | TCACCGGTCGGCGGCCCACGGTTTTAGAGCTAGAAATAGCAAG | 70 |
| EmrD N20 Low | CGTGGGCCGCCGACCGGTGAACTAGTATTATACCTAGGACTGAG | 71 |
| EmrD SSDNA | CGT TGC CAG CAT AAA AAT GGA CAT TCC GAC GAG | 72 |
| Repair | GAT CAC CGG TCG GCG GCC CAC GCG TTA TTA TTA | |
| | ATT GGA AAT CGG GCC ATA AAA CAG CTG TGA GAC | |
| | ACC GTA AGT CAG CAG ATA AGC GCC | |
| EmrD 200 Up | CGATGCTGACGCATCTTATCCGCCC | 73 |
| EmrD 200 Low | GGTGCGGGCAGATATCAGTCGTATC | 74 |
| YdeF N20 Up | GATGGTTAATAACAACGACGGTTTTAGAGCTAGAAATAGCAAG | 75 |
| YdeF N20 Low | CGTCGTTGTTATTAACCATCACTAGTATTATACCTAGGACTGAG | 76 |
| YdeF SSDNA | AAT GGT CAT AAA TGG CAG CGT AGC GCC GCG TCC | 77 |
| Repair | GAT GGT TAA TAA CAA CGA CGA TTA TTA TTA ATT | |
| | AAG AAG GGC GCT GGT AGA GCG TCG TAG GGA TAA | |
| | GTT CAT | |
| YdeF 250 Up | CTGATGGTTAATCCATACCCCAGC | 78 |
| YdeF Check | GATGCTCTGCATTACCAACAGCGTG | 79 |
| Internal | | |
| MdtJ N20 Up | AGCGTCAGTGAGGGAAATGGGTTTTAGAGCTAGAAATAGCAAG | 80 |
| MdtJ N20 Low | CCATTTCCCTCACTGACGCTACTAGTATTATACCTAGGACTGAG | 81 |
| MdtJ SSDNA | CGA CAG AGA AAT CAT CAC CAG CAT TAA AAT AAA | 82 |
| Repair | TTA TTA TTA ATT GCC ATT TCC CTC ACT GAC GCT | |
| | CGC CCA TTT CAT TGA CAG CGT ACC GGT | |
| MdtJ 200 Up | CAATGCATAAGCGACAGACAAGTCG | 83 |
| MdtJ 200 Low | CATCCGCGATGACGAGAAGCAACAC | 84 |
| YdiM N20 Up | GATAACTATCGAGACACCCGGTTTTAGAGCTAGAAATAGCAAG | 85 |
| YdiM N20 Up | CGGGTGTCTCGATAGTTATCACTAGTATTATACCTAGGACTGAG | 86 |
| YdiM SSDNA | CAA GAC ACT TAA TCG ACC AAT GCC CAG CGA TGA | 87 |
| Repair | GAT AAC TAT CGA GAC ACC CGC TTA TTA TTA ATT | |
| | ATT AGT CTG CCA AAG TGT CTC CAG CGA GGC CAT | |
| | ATT CAG | |
| YdiM Check Up | CAAGTGTGCCATTCCTGATCGTG | 88 |
| YdiM Check Up | GAACCCACGGTGTAGATACTGAG | 89 |
| MdtB N20 Up | GTAGAGCGTGACCACCTGAAGTTTTAGAGCTAGAAATAGCAAG | 90 |
| MdtB N20 Low | TTCAGGTGGTCACGCTCTACACTAGTATTATACCTAGGACTGAG | 91 |
| MdtB SSDNA | AAC GGC AGA GGT CAT GAC ATC CGG GCT GGC ACC | 92 |
| Repair | TGG GTA GAG CGT GAC CAC CTG AAT TTA TTA TTA | |
| | ATT CGG ATA GTC CAC TTC CGG CAG CGC CGA AAC | |
| | GGG CAG | |
| MdtB 200 Up | GTCAGAAAGTGGTGATCCGTGCAG | 93 |
| MdtB Check Low | GATCGCTCGGCAACAAGTTGGTCG | 94 |
| MdlA N20 Up | CATCGCGATAATGACAAGCAGTTTTAGAGCTAGAAATAGCAAG | 95 |
| MdlA N20 Low | GCTTGTCATTATCGCGATGACTAGTATTATACCTAGGACTGAGT | 96 |
| MdlA SSDNA | ACC AAC CAC TTT TGG CGG AAC CAG TTG CAG CAT | 97 |
| Repair | CGC GAT AAT GAC AAG CAA TTA TTA TTA ATT GAC | |
| | AGC CCC GAG ATA GCG ACG CCA TTC CCG ACG GAA | |
| | ATA CCA GCT | |
| MdlA 300 Up | GTCACGGTGGTTACCGAAATGCCAG | 98 |
| MdlA Check | GCGTTAAACTGCCCTGCACCAC | 99 |
| Internal | | |
| EmrY N20 Up | ACTCCGGCACCATTAACCGGGTTTTAGAGCTAGAAATAGCAAG | 100 |
| EmrY N20 Low | CCGGTTAATGGTGCCGGAGTACTAGTATTATACCTAGGACTGAG | 101 |
| EmrY SSDNA | TTG CAT AAA TGT CGC TAA TGA CAA TGC AAT AGT | 102 |
| Repair | GAC GCA CCA TAA CGT TTA TTA TTA ATT ACC GGT | |
| | TAA TGG TGC CGG AGT TGA TTT AGT GAT TGC CAT | |
| EmrY 200 Up | AGCGCAGAACAACTGCGTAATA | 103 |
| EmrY 200 Low | GTACGGGTTGAAGTTTCTCTTG | 104 |
| MdfA N20 Up | GGCAACGATATGATTCAACCGTTTTAGAGCTAGAAATAGCAAG | 105 |
| MdfA N20 Low | GGTTGAATCATATCGTTGCCACTAGTATTATACCTAGGACTGAG | 106 |
| MdfA SSDNA | AAT GCC CGC CTG ATA TTG TTC CAC CAC GGC CAA | 107 |
| Repair | CAT TTA TTA TTA ATT GGG TTG AAT CAT ATC GTT | |
| | GCC GAT ATA GGT TGA AAA TTC GTA AAG CAC CAG | |
| | ACA | |
| MdfA_200_Up | ATCGTCTTATTTCCCTCAAGC | 108 |
| MdfA_200_Low | ATGTGCCGAGTGGATACAAAGT | 109 |
| Fsr N20 Up | TCGCTACTGCAACCAGTGGTGTTTTAGAGCTAGAAATAGCAAG | 110 |
| Fsr N20 Up | ACCACTGGTTGCAGTAGCGAACTAGTATTATACCTAGGACTGAG | 111 |
| Fsr ssDNA Repair | CGA CCA TGG CAT CGG ATA TTT ATC GGT CCA GTA | 112 |
| | TTA TTA TTA ATT GAC CAC TGG TTG CAG TAG CGA | |
| | AGA GGC GAG CTG GAA GGT GAG GGT TAT CAT GCC | |
| | AAT CTG | |
| Fsr Check Up | GGTTAACAGCGCTAACGCCACG | 113 |
| Fsr Check Low | GTGGCGTGATGCATTCCGTCTC | 114 |
| MdtG N20 Up | ATGCTATTACGCTCTGCCCTGTTTTAGAGCTAGAAATAGCAAG | 115 |
| MdtG N20 Low | AGGGCAGAGCGTAATAGCATACTAGTATTATACCTAGGACTGAG | 116 |
| MdtG SSDNA | GAT ATT TTG TGC CAG CCC CAT CAA CAC CAT CAC | 117 |
| Repair | GAT GCC CAT TTA TTA TTA ATT GAG GGC AGA GCG | |
| | TAA TAG CAT GAG TTT TCG GCC TTT ACG GTC GGC | |
| | GAG TCC ACC CCA AAA CGG | |
| MdtG Check Up | GGCATTGAACTGTTGCACATTCGC | 118 |
| MdtG Check Low | CATGATGGCACCAGAGCAGTATATG | 119 |
| MdtH N20 Up | GAGAGCAATACCGACCATGAGTTTTAGAGCTAGAAATAGCAAG | 120 |
| MdtH N20 Low | TCATGGTCGGTATTGCTCTCACTAGTATTATACCTAGGACTGAG | 121 |
| MdtH SSDNA | GAA AAT ACC CAG ACC TTG CTG AAT AAA TTG GCG | 122 |
| Repair | TAG ACC GAG AGC AAT ACC GAC CAT GAC TTA TTA | |
| | TTA ATT GGC CCA GCC CAT TTG ATC AAC GAA GCG | |
| | GAT AGA | |
| MdtH Check Up | GCGTCGTCGTTGAGCAGAACATG | 123 |
| MdtH Check Low | GTCGGTCTGTGGTTAAGCGCAC | 124 |
| YieO N20 Up | CATCAGTTATACGCTGACGGGTTTTAGAGCTAGAAATAGCAAG | 125 |
| YieO N20 Low | CCGTCAGCGTATAACTGATGACTAGTATTATACCTAGGACTGAG | 126 |
| YieO SSDNA | GCG ATC GGC TAG CCA TCC GCT TAC CGG AAT AAG | 127 |
| Repair | CAT TTA TTA TTA ATT CAC CGT CAG CGT ATA ACT | |
| | GAT GAT GGC TGA TTG CAT CGC GAG AGG AGA ACG | |
| | ATT AAG | |
| YieO Check Up | CGTCAATTACCAGCGACACAGTG | 128 |
| YieO Check | CGTGCATGGAGAATATAGAGAAGC | 129 |
| Internal | | |
| MdlB N20 Up | ATCAGGACCGCAATCCCCAGGTTTTAGAGCTAGAAATAGCAAG | 130 |
| MdlB N20 Low | CTGGGGATTGCGGTCCTGATACTAGTATTATACCTAGGACTGAG | 131 |
| MdlB SSDNA | ACT GAC TTC TGC CGC CGC CGC AAC CCA CAT CAT | 132 |
| Repair | CAG GAC CGC AAT CCC CAG TTA TTA TTA ATT TTT | |
| | ACG CCA CGG CGA ACC GTA CGC TAA CAG GCG CTT | |
| | GAG AGT | |
| MdlB Check Up | CTTGATGATGCGCTTTCGGCGGTG | 133 |
| MdlB Check | CGCCATATAGTGTGAACGACTGGCC | 134 |
| Internal | | |
| MdtO N20 Up | TTCATGAAGAGTTAAGCGAGGTTTTAGAGCTAGAAATAGCAAG | 135 |
| MdtO N20 Low | CTCGCTTAACTCTTCATGAAACTAGTATTATACCTAGGACTGAG | 136 |
| MdtO SSDNA | GAG TTG CAC GGT CTG CGG CAC GCG ACC TGG TCG | 137 |
| Repair | TTA TTA TTA ATT CTC GCT TAA CTC TTC ATG AAA | |
| | GAA CGC CAG CAG CCT GAC CAC CGG TAA TGG CAG | |
| | GGA GTT | |
| MdtO Check | CGTAGCGCATATAGTCTGGATTGG | 138 |
| Internal | | |
| MdtO Check Up | GAGGGTAAAGTGGATTCGATTGGC | 139 |
| YojI N20 Up | AACTTCTTGTACTTGTCTGGGTTTTAGAGCTAGAAATAGCAAG | 145 |
| YojI N20 Low | GCCAGACAAGTACAAGAAGTTACTAGTATTATACCTAGGACTGAG | 146 |
| YojI SSDNA | TAG CGC CAT CAC ACT GAT AAA TGG CCA GCG ATA | 147 |
| Repair | CTG TTA TTA TTA ATT CCA GAC AAG TAC AAG AAG | |
| | TTC CAT GCA GAA AAC CCG GAC AAT GAA TTA CAG | |
| | CCC GCA GTT | |
| YojI Check | GTCGCGGCAACGTTGGTATCAG | 148 |
| Internal | | |
| YojI Check Up | GCTGCATCAGGATAAAGACGAACCG | 149 |
| YajR N20 Up | GGTGAGAGGCGCGCGACCTGGTTTTAGAGCTAGAAATAGCAAG | 150 |
| YajR N20 Low | CAGGTCGCGCGCCTCTCACCACTAGTATTATACCTAGGACTGAG | 151 |
| YajR SSDNA | GCC CAG CAT GCG CAA CGA GAA TAC GGT CCC TTA | 152 |
| Repair | TTA TTA ATT CCA GGT CGC GCG CCT CTC ACC TGG | |
| | CGT CAT TTT ATA ATC GTT cat TAC CAC CTC TGT | |
| | TTT AAA TTC | |
| YajR Check Up | GTTGCTGATGACAGAATCTGGGCGC | 153 |
| YajR Check | CCATTCCGGACTCACGATTAAGTACG | 154 |
| Internal | | |
| YdhC N20 Up | TTGCAGGTCGGCCTGTATGGGTTTTAGAGCTAGAAATAGCAAG | 155 |
| YdhC N20 Low | CCATACAGGCCGACCTGCAAACTAGTATTATACCTAGGACTGAG | 156 |
| YdhC SSDNA | AAG GAA CAG ACT AAG GCT GGC ACT GAC AGC AGA | 157 |
| Repair | CGC AGG CGT TTG CAG GTC GGC CTG TAT GGC TTA | |
| | TTA TTA ATT GAA AGC AGG CAG ATA CAT ATC GGT | |
| | TGC CAG AAA | |
| YdhC Check Up | CACATCACGGTGCCGTCGTTCAAAG | 158 |
| YdhC Check | CCGGTTTACGACCATAACGGTCGG | 159 |
| Internal | | |
| CusA N20 Up | ATAGATCCAGCCAACACCCGGTTTTAGAGCTAGAAATAGCAAG | 160 |
| CusA N20 Low | CGGGTGTTGGCTGGATCTATACTAGTATTATACCTAGGACTGAG | 161 |
| CusA SSDNA | CAG ATC GTG CTT ACC GCT GCG ATC CAC CAG TGC | 162 |
| Repair | ATA TTC ATA GAT CCA GCC AAC ACC CGT TTA TTA | |
| | TTA ATT ATC TGG CCC CAG CTC GGC GCT GAC TCC | |
| CusA 200 Up | GGTGATTACCGTTGATGCCGAC | 163 |
| CusA Check | GAGAAACCAGTCCTGTAATGAGCG | 164 |
| Internal | | |
| YhaM_N20_Fwd | GTTGGTATGCCCGCCGACGAGTTTTAGAGCTAGAAATAGCAAG | 343 |
| YhaM_N20_Rvs | TCGTCGGCGGGCATACCAACACTAGTATTATACCTAGGACTGAG | 344 |
| YhaM_Check_Fwd | CAACATTAACGAATTAAACAACCCG | 345 |
| YhaM_Check_Rvs | GTTGCTGTGTGTTTCTCCGTTC | 346 |
| YhaM SSDNA | CAC ACC ATC GTG CGT CTC GAT ATG CAC AAT GTT | 347 |
| Repair | GGT ATG CCC GCC GAC GAT TGT GAC ACA CGC CCA | |
| | CTT CTC ACC GTT CCA GAC TTT GGC TCG AGA GAA | |
| | GAG GAT TTC ATC | |

### Whole Genome Sequencing of EKO-35v2

[0251] Genomic DNA was extracted using the Purelink Genomic DNA Mini Kit (Invitrogen), according to the manufacturer's guidelines. Quality of the extracted gDNA was assessed using gel electrophoresis. Illumina DNA library preparation was performed using an Illumina Nextera kit by the Microbial Genome Sequencing Center (Pennsylvania, USA), which was followed by Illumina sequencing on a NextSeq 2000 platform. Analysis of the raw reads was performed using Geneious Prime 2021.0.2 (Kearse, M. et al., 2012). Low quality reads were trimmed using an in-suite BBDuk plug-in. Raw wild-type reads were assembled to an NCBI reference genome (Accession No. CP009273.1) with bowtie2. The resulting assembly was used as a reference to assemble the EKO-35v2 mutant reads. Differences between the wild-type BW25113 and EKO-35v2 strains were identified by searching for single nucleotide polymorphisms (SNPs) and deletions using the following thresholds: minimum variant frequency of 0.75, maximum variant P-value of 10⁻⁶, and minimum variant P-value of 10⁻⁵. The results were confirmed using the breseq (v 0.35.6) pipeline. Three intergenic mutations and three secondary mutations were identified, as summarize in Table 24. The nonsynonymous mutation in yhaM was repaired using CRISPR-Cas9-mediated counterselection, which introduced three intentional silent mutations (yhaM A390T, C393A, C432A) to remove the adjacent PAM site and introduce XhoI-guided screening.

TABLE 24
EKO-35v2 genomic mutations. Single nucleotide polymorphisms were
identified relative to the parent E. coli K-12 genome.
Secondary Mutations

| | Base Pair | | |
|---|---|---|---|
| Gene | Mutation | Effect | Gene Function |
| xylG | A116C | Missense | D-xylose ABC |
| | | | transporter |
| ydgK | C231T | Silent | Putative inner |
| | | | membrane protein |

Intergenic Mutations

| 5′ Flanking | 3′ Flanking | Position relative to | |
|---|---|---|---|
| gene | Gene | flanking genes | Mutation |
| ecpR | ykgL | −144/−632 | (T)₈ → (T)₇ |
| cysZ | cysK | +21/−164 | A→ T |
| kduI | yqeF | −123/+164 | T→ C |

### Phenotypic Profiling of EKO-35

[0252] For growth profiling in nutrient-rich conditions, strains were propagated on LB agar for 18 h at 37° C. Single colonies were inoculated into LB and grown at 37° C. until the mid-exponential phase (OD600 nm˜0.6) was reached. All strains were assessed with at least three biological replicates. The cultures were standardized to an OD600 nm˜0.1 in sterile 0.85% saline (w/v). Standardized cultures were diluted 1/200 into LB and 100 μL of the resulting dilution were applied to round-bottom 96-well microtiter plates (VWR). To prevent evaporation, the microtiter plates were sealed (labeling tape, Fisher Scientific). The OD600 nm was measured every 15 minutes over the course of 24 h using a BioTek Synergy H1 microplate reader. Growth was assessed at both 37° C. and 25° C.

### Results

[0253] Generation of EKO-35: Inactivation of E. coli Drug Efflux Pumps

[0254] Inventors' first goal was to generate a simplified genetic background to overcome the challenges associated with the complexities of intact drug efflux networks. To generate the first-generation strain, inventors started with an ΔacrB mutant from the Keio Collection and removed a further 13 pumps using the λ-Red system and 22 additional pumps using CRISPR Cas9-mediated counterselection. As such, EKO-35 of Example 1 (i.e. EKO-35v1) contains 13 flippase recognition target (FRT) sites and 11 secondary mutations. To circumvent genomic mobility due to FRT site-mediated DNA translocation, the inventors created the second-generation strain, EKO-35v2, using only CRISPR Cas9-mediated counterselection. EKO-35v2 is a scarless genetic background with significantly fewer secondary mutations, representing a stable isogenic background devoid of 35 efflux-encoding genes (Table 24).

[0255] The efflux genes were inactivated in the following order: ΔyajR; mdtO; ydhC; emrE; yojI; mdtD, sugE; ynfM, emrD, ydeF; mdlA, emrY; mdtK, bcr; mdtG; mdtH, mdlB, macB, yddA; fsr; ydiM; yieO; mdfA; mdtM; mdtJ; emrB, mdtB, mdtL; yebQ; cusA; mdtF; ydeA; acrF; acrB. While generating the strain, inventors identified a missense mutation (K₁₃₉T) within the gene encoding a putative L-cysteine desulfidase (YhaM). In effort to create a scarless genetic background devoid of secondary mutations, the inventors repaired this mutation. However, an additional missense mutation (N39H) arose within a gene encoding a xylose ABC transporter (XlyG).

[0256] Since many of the efflux pump-encoding genes have predicted start codons and are poorly characterized, it is possible that alternative start codons located downstream from the inserted tandem stop codons (Table 26A) could be utilized for a subset of the CRISPR-inactivated pumps. To investigate, inventors profiled the genome of the efflux-deficient strain, which included the inserted stop codons, using the Prodigal prokaryotic gene recognition and translation initiation site identifier (Hyatt et al, 2010). Overall, the program did not predict production of any potentially functional efflux pumps in EKO-35v1 and EKO-35v2, which supports the notion that the tandem stop codons were sufficient to prematurely terminate translation, and that alternate start codons would not be utilized (Tables 26A and 26B). Indeed, Prodigal analysis of the wild-type strain's genome predicted production of all pumps (Table 26B). In addition, inventors also took advantage of new developments in protein structure predictions, and carefully analyzed AlphaFold-generated models of each efflux pump to ascertain whether the predicted start codons were correct based on the structural features of the proteins. Such an analysis indicated the inserted stop codons were sufficient to inactivate the different genes. This strain was subsequently designated Efflux KnockOut-35 version 2 (EKO-35v2), and was used for phenotypic characterization and construction of an efflux platform, as described below. The EKO-35v2 genome sequence (SEQ ID NO: 255) confirmed successful disruption of the 35 efflux-encoding genes, including successful repair of yhaM, and also revealed two additional secondary mutations, one of which encoded missense mutations and one silent substitutions (Table 24).

### Characterizing EKO-35: Phenotypic Analysis

[0257] With the intent of using EKO-35 as a simplified genetic background to study the functions of drug efflux pumps, inventors' second goal was to fully characterize EKO-35v1 and v2 prior to further investigations. Other efflux-deficient backgrounds (e.g., tolC mutants) display pleiotropic phenotypes, including severe growth defects in minimal M9 medium with glucose supplied as the carbon source. Indeed, tolC inactivation causes periplasmic accumulation of enterobactin in this low-iron growth medium, which underlies this conditionally essential phenotype. In addition, tolC mutants exhibit membrane stress and depletion of essential metabolites, resulting in ‘metabolic shutdown’ in minimal glucose medium. Phenotypic analysis of EKO-35v1 growth kinetics under standard laboratory conditions, nutrient-rich Lysogeny broth, revealed EKO-35v1 exhibited a 1 h extended lag phase. To assess the impact of the secondary mutations and genomic mobility on the growth kinetics of EKO-35v1, the growth kinetics of EKO-35v2 were also profiled. Compared to the wild-type strain, EKO-35v2 shows no significant difference in the lag phase of growth or doubling time (FIG. 19, Table 25). As such, inventors conclude the previously observed phenotypic differences between the parent strain and EKO-35v1 were due to genomic limitations of the strain, rather than loss of efflux-encoding genes. Therefore, both EKO-35v1 and EKO-35v2 are useful platforms for investigating drug efflux.

TABLE 25
Measurement of growth kinetics revealed statistically significant
differences between EKO-35v2 and the wild-type strain. Generation
time and the duration of the lag phase for each strain are
shown in minutes. The measurements represent the mean ±
standard deviation for three biological replicates.

| | | | |
|---|---|---|---|
| | Generation | | |
| Strain | time (min) | Lag phase (min) | Final OD_{600 nm} |

Nutrient-rich medium at 37° C.

| | | | |
|---|---|---|---|
| K-12 | 29.66 ± 1.067 | 207.85 ± 0.663 | 0.501 ± 0.010 |
| EKO-35v1 | 32.04 ± 1.531 | 256.15 ± 0.946 | 0.415 ± 0.008 |
| EKO-35v2 | 30.50 ± 0.7512 | 209.09 ± 1.234 | 0.496 ± 0.021 |
| P-value_{EKO-35v1} | 5.54 × 10⁻³ | 1.99 × 10⁻¹⁹ | 5.29 × 10⁻¹⁰ |
| P-value_{EKO-35v2} | 1.15 × 10⁻¹* | 3.82 × 10⁻² | 5.29 × 10⁻¹* |

*non-significant P-values.
Statistical significance was assessed using a two-tailed Student's t-test (P-value ≤ 0.05).

TABLE 26A
Prediction of protein-coding genes using Prodigal prokaryotic gene
recognition and translation initiation site identifier. A consensus sequence (60%
threshold) of the efflux-deficient strain genome assembly, containing the tandem stop
codons, was utilized as the query fasta. As a control, the wild-type E. coli K-12
genome, without any CRISPR modifications, was also used (GenBank: CP009273.1).
The Prodigal results were searched for efflux-encoding genes using BLASTP (cutoff
threshold E < 1.0 e⁻⁵⁰). Predicted peptide size in EKO-35 is denoted as the length of
the truncated peptide as a fraction of the total protein size.
EKO-35 Genome and EKO-35v2 Genome

| | | Predicted | Predicted | | SEQ |
|---|---|---|---|---|---|
| | | Translation Start | Peptide | Predicted | ID |
| Gene | Predicted RBS | Site | Size | Stop Site | NO: |
| acrB | — | — | — | | |
| acrD | — | — | — | | |
| acrF | — | — | — | | |
| mdtF | — | — | — | | |
| macB | — | — | — | | |
| emrB | — | — | — | | |
| mdtL | — | — | — | | |
| mdtK | — | — | — | | |
| bcr | — | — | — | | |
| ydeA | — | — | — | | |
| mdtM | — | — | — | | |
| yddA | — | — | — | | |
| yebQ | — | — | — | | |
| emrE | AGGA/GGAG/ | MNPYIYLG [...] | 233 | GFTN* | 244 |
| | GAGG | | | | |
| mdtD | — | — | | | |
| sugE | — | — | — | | |
| ynfM | — | — | — | | |
| emrD | Unknown | MKRQRNVN [...] | 234 | PISN* | 245 |
| ydeF | — | — | | | |
| mdtJ | AGGAG | MYIYWILL [...] | 235 | GNGN* | 245 |
| ydiM | AGxAG | MKNPYFPT [...] | 236 | QTNN* | 246 |
| mdtB | AGGAG | MQVLPPSS [...] | 237 | DYPN* | 247 |
| mdlA | — | — | | | |
| emrY | — | — | | | |
| mdfA | — | — | | | |
| fsr | Unknown | MAMSEQPQ [...] | 238 | PVVN* | 249 |
| mdtG | GGA/GAG/AGG | MSPCENDT [...] | 239 | SALN* | 250 |
| mdtH | GGAGG | MSRVSQAR [...] | 240 | GWAN* | 251 |
| yieO | AGGA | MSDKKKRS [...] | 241 | LTVN* | 252 |
| mdlB | — | — | | | |
| mdtO | — | — | | | |
| yojI | — | — | | | |
| ydhC | GGA/GAG/AGG | MQPGKRFL [...] | 242 | PAFN* | 253 |
| cusA | GGAG/GAGG | MIEWIIRR [...] | 243 | GPDN* | 254 |

TABLE 26B
Prediction of protein-coding genes using Prodigal prokaryotic gene
recognition and translation initiation site identifier. A consensus sequence
(60% threshold) of the efflux-deficient strain genome assembly, containing
the tandem stop codons, was utilized as the query fasta. As a control, the
wild-type E. coli K-12 genome, without any CRISPR modifications, was also
used (GenBank: CP009273.1). The Prodigal results were searched for efflux-
encoding genes using BLASTP (cutoff threshold E < 1.0 e⁻⁵⁰). Predicted peptide
size in EKO-35 is denoted as the length of the truncated peptide as a
fraction of the total protein size.
K-12 Genome

| | | Predicted Translation | |
|---|---|---|---|
| Gene | Predicted RBS | Start Site | SEQ ID NO: |
| acrB | AGGAG | MPNFFIDR [....] | 199 |
| acrD | GGAG/GAGG | MANFFIDR [....] | 200 |
| acrF | GGA/GAG/AGG | MANFFIRR [....] | 201 |
| mdtF | GGA/GAG/AGG | MANYFIDR [....] | 202 |
| macB | AGGAG | MTPLLELK [....] | 203 |
| emrB | GGAG/GAGG | MQQQKPLE [....] | 204 |
| mdtL | AGGA/GGAG/GAGG | MSRFLICS [....] | 205 |
| mdtK | GGA/GAG/AGG | MQKYISEA [....] | 206 |
| bcr | AGGAG | MTTRQHSS [....] | 207 |
| ydeA | Unknown | MTTNTVSR [....] | 208 |
| mdtM | AGGAG | MPRFFTRH [....] | 209 |
| yddA | Unknown | MITIPITL [....] | 210 |
| yebQ | Unknown | MPKVQADG [....] | 211 |
| emrE | AGGA/GGAG/GAGG | MNPYIYLG [....] | 212 |
| mdtD | GGAG/GAGG | MTDLPDST [....] | 213 |
| sugE | GGAG/GAGG | MSWIILVI [....] | 214 |
| ynfM | AGGA | MSRTTTVD [...] | 215 |
| emrD | Unknown | MKRQRNVN [...] | 216 |
| ydeF | GGA/GAG/AGG | MNLSLRRS [...] | 217 |
| mdtJ | AGGAG | MYIYWILL [...] | 218 |
| ydiM | AGxAG | MKNPYFPT [...] | 219 |
| mdtB | AGGAG | MQVLPPSS [...] | 220 |
| mdlA | AGGA | MRLFAQLS [...] | 221 |
| emrY | GGA/GAG/AGG | MAITKSTP [...] | 222 |
| mdfA | Unknown | MQNKLASG [...] | 223 |
| fsr | Unknown | MAMSEQPQ [...] | 224 |
| mdtG | GGA/GAG/AGG | MSPCENDT [...] | 225 |
| mdtH | GGAGG | MSRVSQAR [...] | 226 |
| yieO | AGGA | MSDKKKRS [...] | 227 |
| mdlB | AGGAG | MRSFSQLW [...] | 228 |
| mdtO | GGA/GAG/AGG | MSALNSLP [...] | 229 |
| yojI | Unknown | MELLVLVW [...] | 230 |
| ydhC | GGA/GAG/AGG | MQPGKRFL [...] | 231 |
| cusA | GGAG/GAGG | MIEWIIRR [...] | 232 |

[0258] While the present disclosure has been described with reference to what are presently considered to be the preferred example, it is to be understood that the disclosure is not limited to the disclosed example. To the contrary, the disclosure is intended to cover various modifications and equivalent arrangements included within the spirit and scope of the appended claims.

[0259] All publications, patents and patent applications are herein incorporated by reference in their entirety to the same extent as if each individual publication, patent or patent application was specifically and individually indicated to be incorporated by reference in its entirety.

### REFERENCES

[0260] Baba, T. et al. Construction of Escherichia coli K-12 in-frame, single-gene knockout mutants: the Keio collection. Mol. Syst. Biol. 2, (2006).
[0261] Cox, J. & Mann, M. MaxQuant enables high peptide identification rates, individualized p.p.b.-range mass accuracies and proteome-wide protein quantification. Nat. Biotechnol. 26, 1367-1372 (2008).
[0262] Cox, J. & Mann, M. 1D and 2D annotation enrichment: a statistical method integrating quantitative proteomics with complementary high-throughput data. BMC Bioinformatics 13 Suppl 16, S12 (2012).
[0263] Cox, J. et al. Accurate proteome-wide label-free quantification by delayed normalization and maximal peptide ratio extraction, termed MaxLFQ. Mol. Cell. Proteomics 13, 2513-2526 (2014).
[0264] Hazel, A. J. et al. Conformational dynamics of AcrA govern multidrug efflux pump assembly. ACS Infect. Dis. 5, 1926-1935 (2019).
[0265] Johnson, J. W. et al. Antibacterial Activity of Metergoline Analogues: Revisiting the Ergot Alkaloid Scaffold for Antibiotic Discovery. ACS Med. Chem. Lett. 13, 284-291 (2022).
[0266] Rappsilber, J., Mann, M. & Ishihama, Y. Protocol for micro-purification, enrichment, pre-fractionation and storage of peptides for proteomics using StageTips. Nat. Protoc. 2, 1896-1906 (2007).
[0267] Stover, C. K. et al. Complete genome sequence of Pseudomonas aeruginosa PAO1, an opportunistic pathogen. Nature 406, 959-964 (2000).
[0268] Datsenko, K. A. & Wanner, B. L. One-step inactivation of chromosomal genes in Escherichia coli K-12 using PCR products. Proc. Natl. Acad. Sci. U.S.A. 97, 6640-6645 (2000).
[0269] Cherepanov, P. P. & Wackernagel, W. Gene disruption in Escherichia coli: TcR and KmR cassettes with the option of Flp-catalyzed excision of the antibiotic-resistance determinant. Gene 158, 9-14 (1995).
[0270] Jiang, Y. et al. Multigene editing in the Escherichia coli genome via the CRISPR-Cas9 system. Appl. Environ. Microbiol. 81, 2506-2514 (2015).
[0271] Cox, G. et al. A Common Platform for Antibiotic Dereplication and Adjuvant Discovery. Cell Chem Biol 24, 98-109 (2017).
[0272] Kearse, M. et al. Geneious Basic: an integrated and extendable desktop software platform for the organization and analysis of sequence data. Bioinformatics 28, 1647-1649 (2012).
[0273] Kitagawa, M. et al. Complete set of ORF clones of Escherichia coli ASKA library (a complete set of E. coli K-12 ORF archive): unique resources for biological research. DNA Res. 12, 291-299 (2005).
[0274] Lewinson, O. et al. Alkalitolerance: a biological function for a multidrug transporter in pH homeostasis. Proc. Natl. Acad. Sci. U.S.A. 101, 14073-14078 (2004).
[0275] Patel J. B., Cockerill R. F., Bradford A. P., Eliopoulos M. G., Hindler A. J., Jenkins G. S., Lewis S. J., Limbago B., Miller A. L., Nicolau P. D., Pwell M., Swenson M. J., Traczewski M. M., Turnidge J. D. WPMZLB. M07-A10: Methods for Dilution Antimicrobial Susceptibility Tests for Bacteria That Grow Aerobically; Approved Standard—Tenth Edition. CLSI (Clinical Lab Stand Institute) (2015).
[0276] Tyanova, S. et al. The Perseus computational platform for comprehensive analysis of (prote)omics data. Nat. Methods 13, 731-740 (2016).
[0277] Grenier, F. et al. Complete genome sequence of Escherichia coli BW25113. Genome announcements 2.5, e01038-14 (2014).

1. An Escherichia coli strain comprising at least 20 of inactivated genes acrB, acrD, acrF, mdtF, macB, emrB, mdtL, mdtK, bcr, ydeA, mdtM, yddA, yebQ, emrE, mdtD, sugE, ynfM, emrD, ydeF, mdtJ, ydiM, mdtB, mdlA, emrY, mdfA, fsr, mdtG, mdtH, yieO, mdlB, mdtO, yojI, yajR, ydhC, and cusA.

2. The Escherichia coli strain of claim 1, comprising at least 34 of the inactivated genes.

3. The Escherichia coli strain of claim 1, comprising all 35 inactivated genes.

4. The Escherichia coli strain of claim 1, wherein the Escherichia coli strain is deposited under IDAC accession number 310522-01 or IDAC accession number 070623-01, or an Escherichia coli comprising a nucleic acid having the sequence as shown in SEQ ID NO: 255.

5. The Escherichia coli strain of claim 1, further comprising an open variant of outer membrane ferric siderophore transporter FhuA.

6. The Escherichia coli strain of claim 3, wherein at least one of acrB, acrD, acrF, mdtF, macB, emrB, mdtL, mdtK, bcr, ydeA, mdtM, yddA, yebQ, emrE, mdtD, sugE, ynfM, emrD, ydeF, mdtJ, ydiM, mdtB, mdlA, emrY, mdfA, fsr, mdtG, mdtH, yieO, mdlB, mdtO, yojI, yajR, ydhC, and cusA, is reactivated, optionally under the control of a constitutive promoter.

7. The Escherichia coli strain of claim 6, wherein one of acrB, acrD, acrF, mdtF, macB, emrB, mdtL, mdtK, bcr, ydeA, mdtM, yddA, yebQ, emrE, mdtD, sugE, ynfM, emrD, ydeF, mdtJ, ydiM, mdtB, mdlA, emrY, mdfA, fsr, mdtG, mdtH, yieO, mdlB, mdtO, yojI, yajR, ydhC, and cusA, is reactivated.

8. The Escherichia coli strain of claim 5, wherein at least one of acrB, acrD, acrF, mdtF, macB, emrB, mdtL, mdtK, bcr, ydeA, mdtM, yddA, yebQ, emrE, mdtD, sugE, ynfM, emrD, ydeF, mdtJ, ydiM, mdtB, mdlA, emrY, mdfA, fsr, mdtG, mdtH, yieO, mdlB, mdtO, yojI, yajR, ydhC, and cusA, is reactivated.

9. The Escherichia coli strain of claim 8, wherein one of acrB, acrD, acrF, mdtF, macB, emrB, mdtL, mdtK, bcr, ydeA, mdtM, yddA, yebQ, emrE, mdtD, sugE, ynfM, emrD, ydeF, mdtJ, ydiM, mdtB, mdlA, emrY, mdfA, fsr, mdtG, mdtH, yieO, mdlB, mdtO, yojI, yajR, ydhC, and cusA, is reactivated.

10. The Escherichia coli strain of claim 1, wherein inactivation comprises deletion of the gene, or introducing a mutation into the gene to ablate expression of the gene or eliminate efflux pump activity of the protein expressed by the gene.

11. A method for identifying a compound that is an antibacterial agent, comprising
(a) i) contacting the compound with an Escherichia coli strain of comprising at least 20 of inactivated genes acrB, acrD, acrF, mdtF, macB, emrB, mdtL, mdtK, bcr, ydeA, mdtM, yddA, yebQ, emrE, mdtD, sugE, ynfM, emrD, ydeF, mdtJ, ydiM, mdtB, mdlA, emrY, mdfA, fsr, mdtG, mdtH, yieO, mdlB, mdtO, yojI, yajR, ydhC, and cusA (Strain A) and with wild-type Escherichia coli; and/or
ii) contacting the compound with Strain A and an Escherichia coli strain comprising inactivated genes acrB, acrD, acrF, mdtF, macB, emrB, mdtL, mdtK, bcr, ydeA, mdtM, yddA, yebQ, emrE, mdtD, sugE, ynfM, emrD, ydeF, mdtJ, ydiM, mdtB, mdlA, emrY, mdfA, fsr, mdtG, mdtH, yieO, mdlB, mdtO, yojI, yajR, ydhC, and cusA, wherein at least one of acrB, acrD, acrF, mdtF, macB, emrB, mdtL, mdtK, bcr, ydeA, mdtM, yddA, yebQ, emrE, mdtD, sugE, ynfM, emrD, ydeF, mdtJ, ydiM, mdtB, mdlA, emrY, mdfA, fsr, mdtG, mdtH, yieO, mdlB, mdtO, yojI, yajR, ydhC, and cusA, is reactivated (Strain B); and/or
iii) contacting the compound with Strain A and an Escherichia coli strain comprising inactivated genes acrB, acrD, acrF, mdtF, macB, emrB, mdtL, mdtK, bcr, ydeA, mdtM, yddA, yebQ, emrE, mdtD, sugE, ynfM, emrD, ydeF, mdtJ, ydiM, mdtB, mdlA, emrY, mdfA, fsr, mdtG, mdtH, yieO, mdlB, mdtO, yojI, yajR, ydhC, and cusA, wherein one of acrB, acrD, acrF, mdtF, macB, emrB, mdtL, mdtK, bcr, ydeA, mdtM, yddA, yebQ, emrE, mdtD, sugE, ynfM, emrD, ydeF, mdtJ, ydiM, mdtB, mdlA, emrY, mdfA, fsr, mdtG, mdtH, yieO, mdlB, mdtO, yojI, yajR, ydhC, and cusA, is reactivated (Strain C); and
(b) detecting viability of each of the Escherichia coli;
wherein the compound is identified as an antibacterial agent if the compound decreases viability of wild-type less than Strain A;
optionally wherein the compound is identified as an antibacterial agent if the compound decreases viability of Strain B less than Strain A;
optionally wherein the compound is identified as an antibacterial agent if the wild-type Escherichia coli or Strain B is resistant to the compound, and the compound decreases the viability of Strain A.

12. The method of claim 11, wherein the decrease in viability of wild-type or Strain B after contacting the compound is at most 10%, 20%, 30%, 40%, 50%, 60%, 70%, or 80%, and the viability of Strain A is at least 20%, 30%, 40%, 50%, 60%, 70%, 80%, 90%, or 100%.

13. The method of claim 11, wherein the compound is identified as an antibacterial agent if the compound decreases the viability of Strain A at a faster rate than the decrease in viability of wild-type or Strain B.

14. The method of claim 11, wherein the compound decreases the viability of Strain C less than Strain A, thereby identifying specificity of the compound for an efflux pump encoded by the reactivated gene, optionally the compound has a lower minimum inhibitory concentration (MIC) in Strain A than Strain C.

15. The method of claim 11, wherein the contacting comprises incubating the Escherichia coli in a suitable culturing media for optimal Escherichia coli growth.

16. The method of claim 11, wherein the contacting comprises incubating the Escherichia coli in nutrient-limiting culturing media.

17. The method of claim 15, wherein the contacting comprises incubating the Escherichia coli for at least 24 h, 48 h, 72 h, or 96 h.

18. The method of claim 11, wherein the culturing media is a media having a pH of about 2, about 3, about 4, or about 5.

19. A method for creating an Escherichia coli strain producing one or more efflux pump, comprising reactivating one of acrB, acrD, acrF, mdtF, macB, emrB, mdtL, mdtK, bcr, ydeA, mdtM, yddA, yebQ, emrE, mdtD, sugE, ynfM, emrD, ydeF, mdtJ, ydiM, mdtB, mdlA, emrY, mdfA, fsr, mdtG, mdtH, yieO, mdlB, mdtO, yojI, yajR, ydhC, and cusA in the Escherichia coli strain of claim 3.

20. The method of claim 19, wherein the reactivation comprises introducing one or more of acrB, acrD, acrF, mdtF, macB, emrB, mdtL, mdtK, bcr, ydeA, mdtM, yddA, yebQ, emrE, mdtD, sugE, ynfM, emrD, ydeF, mdtJ, ydiM, mdtB, mdlA, emrY, mdfA, fsr, mdtG, mdtH, yieO, mdlB, mdtO, yojI, yajR, ydhC, and cusA, optionally by reversing the inactivation, optionally by re-introducing the gene back in genome with the same promoter or a different promoter, at the same locus or a different locus, optionally by introducing a knock down-resistant version of the gene.

The application's sequence listing, which the Patent Office published only in electronic form, follows.

SEQUENCE LISTING (347 sequences)

SEQ ID NO: 1 - DNA, 24 bp, synthetic construct
  misc_feature 1..24: note = Synthetic construct
  source 1..24: mol_type = other DNA
ctgaaacaagagaacggcaaaggc

SEQ ID NO: 2 - DNA, 26 bp, synthetic construct
  misc_feature 1..26: note = Synthetic construct
  source 1..26: mol_type = other DNA
cttactgacctggacttgccctctcg

SEQ ID NO: 3 - DNA, 23 bp, synthetic construct
  misc_feature 1..23: note = Synthetic construct
  source 1..23: mol_type = other DNA
cgctacagtgaagcaagtcaagc

SEQ ID NO: 4 - DNA, 22 bp, synthetic construct
  misc_feature 1..22: note = Synthetic construct
  source 1..22: mol_type = other DNA
ccgctgagcaggttcttaatcg

SEQ ID NO: 5 - DNA, 24 bp, synthetic construct
  misc_feature 1..24: note = Synthetic construct
  source 1..24: mol_type = other DNA
cgctgactttttcacaaccttccg

SEQ ID NO: 6 - DNA, 25 bp, synthetic construct
  misc_feature 1..25: note = Synthetic construct
  source 1..25: mol_type = other DNA
gtcccccggaggtagtcatcgcagc

SEQ ID NO: 7 - DNA, 24 bp, synthetic construct
  misc_feature 1..24: note = Synthetic construct
  source 1..24: mol_type = other DNA
ggttaaagccactaccgatacccc

SEQ ID NO: 8 - DNA, 25 bp, synthetic construct
  misc_feature 1..25: note = Synthetic construct
  source 1..25: mol_type = other DNA
gaagggagcgggaactatagaaagc

SEQ ID NO: 9 - DNA, 23 bp, synthetic construct
  misc_feature 1..23: note = Synthetic construct
  source 1..23: mol_type = other DNA
gaggctgaagcaatccgtagagc

SEQ ID NO: 10 - DNA, 26 bp, synthetic construct
  misc_feature 1..26: note = Synthetic construct
  source 1..26: mol_type = other DNA
gatactgtatcgttaaaaagagcgcg

SEQ ID NO: 11 - DNA, 25 bp, synthetic construct
  misc_feature 1..25: note = Synthetic construct
  source 1..25: mol_type = other DNA
gcacgagcaatttcctccagccagg

SEQ ID NO: 12 - DNA, 25 bp, synthetic construct
  misc_feature 1..25: note = Synthetic construct
  source 1..25: mol_type = other DNA
ggttgttgagtggtgaatggttagc

SEQ ID NO: 13 - DNA, 23 bp, synthetic construct
  misc_feature 1..23: note = Synthetic construct
  source 1..23: mol_type = other DNA
gatgtcgtgcagctacgcgaaat

SEQ ID NO: 14 - DNA, 21 bp, synthetic construct
  misc_feature 1..21: note = Synthetic construct
  source 1..21: mol_type = other DNA
acgaatggctggagtggtttc

SEQ ID NO: 15 - DNA, 27 bp, synthetic construct
  misc_feature 1..27: note = Synthetic construct
  source 1..27: mol_type = other DNA
cgataccgatgttgagattgtcaaagg

SEQ ID NO: 16 - DNA, 27 bp, synthetic construct
  misc_feature 1..27: note = Synthetic construct
  source 1..27: mol_type = other DNA
gcatagctcttctgtctcattgtgtac

SEQ ID NO: 17 - DNA, 22 bp, synthetic construct
  misc_feature 1..22: note = Synthetic construct
  source 1..22: mol_type = other DNA
atgtgctgacgatccctctgtc

SEQ ID NO: 18 - DNA, 24 bp, synthetic construct
  misc_feature 1..24: note = Synthetic construct
  source 1..24: mol_type = other DNA
ttcgctcattattccaccattcag

SEQ ID NO: 19 - DNA, 23 bp, synthetic construct
  misc_feature 1..23: note = Synthetic construct
  source 1..23: mol_type = other DNA
ggcacctgtcaataaactgatcg

SEQ ID NO: 20 - DNA, 28 bp, synthetic construct
  misc_feature 1..28: note = Synthetic construct
  source 1..28: mol_type = other DNA
gcacatctagtcagtaaactatcttcac

SEQ ID NO: 21 - DNA, 21 bp, synthetic construct
  misc_feature 1..21: note = Synthetic construct
  source 1..21: mol_type = other DNA
cgttcagcgtctgcctgtgcg

SEQ ID NO: 22 - DNA, 21 bp, synthetic construct
  misc_feature 1..21: note = Synthetic construct
  source 1..21: mol_type = other DNA
gcggcaatggaagacgtgctg

SEQ ID NO: 23 - DNA, 23 bp, synthetic construct
  misc_feature 1..23: note = Synthetic construct
  source 1..23: mol_type = other DNA
ggcaactcgcctgatcctccttc

SEQ ID NO: 24 - DNA, 23 bp, synthetic construct
  misc_feature 1..23: note = Synthetic construct
  source 1..23: mol_type = other DNA
atccgcttcgccgctttggttac

SEQ ID NO: 25 - DNA, 22 bp, synthetic construct
  misc_feature 1..22: note = Synthetic construct
  source 1..22: mol_type = other DNA
cattctctttggtataaccgtg

SEQ ID NO: 26 - DNA, 19 bp, synthetic construct
  misc_feature 1..19: note = Synthetic construct
  source 1..19: mol_type = other DNA
tttgctccatgctgaccat

SEQ ID NO: 27 - DNA, 23 bp, synthetic construct
  misc_feature 1..23: note = Synthetic construct
  source 1..23: mol_type = other DNA
ttcactggagaattaataaatcc

SEQ ID NO: 28 - DNA, 22 bp, synthetic construct
  misc_feature 1..22: note = Synthetic construct
  source 1..22: mol_type = other DNA
gacgggattggcgcaacgctcc

SEQ ID NO: 29 - DNA, 24 bp, synthetic construct
  misc_feature 1..24: note = Synthetic construct
  source 1..24: mol_type = other DNA
gaaatcagttaagacattctgttc

SEQ ID NO: 30 - DNA, 22 bp, synthetic construct
  misc_feature 1..22: note = Synthetic construct
  source 1..22: mol_type = other DNA
catgtgcaactgaaagtgaaac

SEQ ID NO: 31 - DNA, 23 bp, synthetic construct
  misc_feature 1..23: note = Synthetic construct
  source 1..23: mol_type = other DNA
ggaatgatagatttgtggttgac

SEQ ID NO: 32 - DNA, 23 bp, synthetic construct
  misc_feature 1..23: note = Synthetic construct
  source 1..23: mol_type = other DNA
cggtgaatatcgtccgttaactg

SEQ ID NO: 33 - DNA, 23 bp, synthetic construct
  misc_feature 1..23: note = Synthetic construct
  source 1..23: mol_type = other DNA
cctctatggctctgatttaagta

SEQ ID NO: 34 - DNA, 22 bp, synthetic construct
  misc_feature 1..22: note = Synthetic construct
  source 1..22: mol_type = other DNA
gttatcatcaggtgaaacgcat

SEQ ID NO: 35 - DNA, 22 bp, synthetic construct
  misc_feature 1..22: note = Synthetic construct
  source 1..22: mol_type = other DNA
gaaagaatcagcgtcagagaaa

SEQ ID NO: 36 - DNA, 21 bp, synthetic construct
  misc_feature 1..21: note = Synthetic construct
  source 1..21: mol_type = other DNA
attaacggcatcctggaaatc

SEQ ID NO: 37 - DNA, 19 bp, synthetic construct
  misc_feature 1..19: note = Synthetic construct]
  source 1..19: mol_type = other DNA
cacgaagaccctggtgaaa

SEQ ID NO: 38 - DNA, 17 bp, synthetic construct
  misc_feature 1..17: note = Synthetic construct
  source 1..17: mol_type = other DNA
cgccgccgctgatcttt

SEQ ID NO: 39 - DNA, 17 bp, synthetic construct
  misc_feature 1..17: note = Synthetic construct
  source 1..17: mol_type = other DNA
gcccttctcacctgcct

SEQ ID NO: 40 - DNA, 21 bp, synthetic construct
  misc_feature 1..21: note = Synthetic construct
  source 1..21: mol_type = other DNA
gcgtaacgacaaaggtagcag

SEQ ID NO: 41 - DNA, 23 bp, synthetic construct
  misc_feature 1..23: note = Synthetic construct
  source 1..23: mol_type = other DNA
cagcgtaacgacaaaggtagcag

SEQ ID NO: 42 - DNA, 17 bp, synthetic construct
  misc_feature 1..17: note = Synthetic construct
  source 1..17: mol_type = other DNA
accaccgcaaaccagtc

SEQ ID NO: 43 - DNA, 22 bp, synthetic construct
  misc_feature 1..22: note = Synthetic construct
  source 1..22: mol_type = other DNA
catcagtaaatcattgccatag

SEQ ID NO: 44 - DNA, 18 bp, synthetic construct
  misc_feature 1..18: note = Synthetic construct
  source 1..18: mol_type = other DNA
gacgccaggaataagaac

SEQ ID NO: 45 - DNA, 18 bp, synthetic construct
  misc_feature 1..18: note = Synthetic construct
  source 1..18: mol_type = other DNA
tgtcgggtgtttcgtcat

SEQ ID NO: 46 - DNA, 18 bp, synthetic construct
  misc_feature 1..18: note = Synthetic construct
  source 1..18: mol_type = other DNA
tcgctgatattgccattc

SEQ ID NO: 47 - DNA, 22 bp, synthetic construct
  misc_feature 1..22: note = Synthetic construct
  source 1..22: mol_type = other DNA
tagttacaattctgcgacatcc

SEQ ID NO: 48 - DNA, 20 bp, synthetic construct
  misc_feature 1..20: note = Synthetic construct
  source 1..20: mol_type = other DNA
cgctcagtgagtttgttcat

SEQ ID NO: 49 - DNA, 21 bp, synthetic construct
  misc_feature 1..21: note = Synthetic construct
  source 1..21: mol_type = other DNA
cacggaagatacagaatcagg

SEQ ID NO: 50 - DNA, 19 bp, synthetic construct
  misc_feature 1..19: note = Synthetic construct
  source 1..19: mol_type = other DNA
cagctatgaaccgcaagaa

SEQ ID NO: 51 - DNA, 43 bp, synthetic construct
  misc_feature 1..43: note = Synthetic construct
  source 1..43: mol_type = other DNA
agttttcagaaggttttacagttttagagctagaaatagcaag

SEQ ID NO: 52 - DNA, 44 bp, synthetic construct
  misc_feature 1..44: note = Synthetic construct
  source 1..44: mol_type = other DNA
tgtaaaaccttctgaaaactactagtattatacctaggactgag

SEQ ID NO: 53 - DNA, 102 bp, synthetic construct
  misc_feature 1..102: note = Synthetic construct
  source 1..102: mol_type = other DNA
ataacaaataattgtaccaacagatggccataattattattaatttgtaaaaccttctgaaaacttcattaaggttgtaccaatgacctttattattactgc

SEQ ID NO: 54 - DNA, 23 bp, synthetic construct
  misc_feature 1..23: note = Synthetic construct
  source 1..23: mol_type = other DNA
cggttcgctaccagagaagaatg

SEQ ID NO: 55 - DNA, 25 bp, synthetic construct
  misc_feature 1..25: note = Synthetic construct
  source 1..25: mol_type = other DNA
catggtgacacctgctaacgtatgc

SEQ ID NO: 56 - DNA, 43 bp, synthetic construct
  misc_feature 1..43: note = Synthetic construct
  source 1..43: mol_type = other DNA
ccacaatccacaattgccaagttttagagctagaaatagcaag

SEQ ID NO: 57 - DNA, 44 bp, synthetic construct
  misc_feature 1..44: note = Synthetic construct
  source 1..44: mol_type = other DNA
ttggcaattgtggattgtggactagtattatacctaggactgag

SEQ ID NO: 58 - DNA, 112 bp, synthetic construct
  misc_feature 1..112: note = Synthetic construct
  source 1..112: mol_type = other DNA
tgtccagcgactgcataaagaagccgaaagccacaatccacaattgccaattattattaattggtgctgtcgggaagatctgtcatttactcggttaccgtttgtttaggtt

SEQ ID NO: 59 - DNA, 20 bp, synthetic construct
  misc_feature 1..20: note = Synthetic construct
  source 1..20: mol_type = other DNA
cgcccgattatgatgactac

SEQ ID NO: 60 - DNA, 22 bp, synthetic construct
  misc_feature 1..22: note = Synthetic construct
  source 1..22: mol_type = other DNA
ctgaaagacaaagcgatcattg

SEQ ID NO: 61 - DNA, 43 bp, synthetic construct
  misc_feature 1..43: note = Synthetic construct
  source 1..43: mol_type = other DNA
cgtcaaacgactaaagccgtgttttagagctagaaatagcaag

SEQ ID NO: 62 - DNA, 44 bp, synthetic construct
  misc_feature 1..44: note = Synthetic construct
  source 1..44: mol_type = other DNA
cgtcaaacgactaaagccgtactagtattatacctaggactgag

SEQ ID NO: 63 - DNA, 120 bp, synthetic construct
  misc_feature 1..120: note = Synthetic construct
  source 1..120: mol_type = other DNA
gacaatcatcgccgtcacagtaataacactcggcgtcaaacgactaaagccgtgttattattaattatatttcaggccaacggcccataccacttccagcagaccagcaataactaagat

SEQ ID NO: 64 - DNA, 18 bp, synthetic construct
  misc_feature 1..18: note = Synthetic construct
  source 1..18: mol_type = other DNA
cgcagcaacgaaagcgca

SEQ ID NO: 65 - DNA, 43 bp, synthetic construct
  misc_feature 1..43: note = Synthetic construct
  source 1..43: mol_type = other DNA
tccggcagagaacagcgccagttttagagctagaaatagcaag

SEQ ID NO: 66 - DNA, 44 bp, synthetic construct
  misc_feature 1..44: note = Synthetic construct
  source 1..44: mol_type = other DNA
tggcgctgttctctgccggaactagtattatacctaggactgag

SEQ ID NO: 67 - DNA, 120 bp, synthetic construct
  misc_feature 1..120: note = Synthetic construct
  source 1..120: mol_type = other DNA
ctgcacacaatagagaagtgcaaatgttgccagtccggcagagaacagcgccagttattattaattgacgcgcataaattgcggcgtaccgcgtttaataaattgatttggctgagaaat

SEQ ID NO: 68 - DNA, 18 bp, synthetic construct
  misc_feature 1..18: note = Synthetic construct
  source 1..18: mol_type = other DNA
gttgcgaaatattcaggc

SEQ ID NO: 69 - DNA, 19 bp, synthetic construct
  misc_feature 1..19: note = Synthetic construct
  source 1..19: mol_type = other DNA
aaagcagtagaataactgc

SEQ ID NO: 70 - DNA, 43 bp, synthetic construct
  misc_feature 1..43: note = Synthetic construct
  source 1..43: mol_type = other DNA
tcaccggtcggcggcccacggttttagagctagaaatagcaag

SEQ ID NO: 71 - DNA, 44 bp, synthetic construct
  misc_feature 1..44: note = Synthetic construct
  source 1..44: mol_type = other DNA
cgtgggccgccgaccggtgaactagtattatacctaggactgag

SEQ ID NO: 72 - DNA, 123 bp, synthetic construct
  misc_feature 1..123: note = Synthetic construct
  source 1..123: mol_type = other DNA
cgttgccagcataaaaatggacattccgacgaggatcaccggtcggcggcccacgcgttattattaattggaaatcgggccataaaacagctgtgagacaccgtaagtcagcagataagcgcc

SEQ ID NO: 73 - DNA, 25 bp, synthetic construct
  misc_feature 1..25: note = Synthetic construct
  source 1..25: mol_type = other DNA
cgatgctgacgcatcttatccgccc

SEQ ID NO: 74 - DNA, 25 bp, synthetic construct
  misc_feature 1..25: note = Synthetic construct
  source 1..25: mol_type = other DNA
ggtgcgggcagatatcagtcgtatc

SEQ ID NO: 75 - DNA, 43 bp, Synthetic construct
  source 1..43: mol_type = other DNA
gatggttaataacaacgacggttttagagctagaaatagcaag

SEQ ID NO: 76 - DNA, 44 bp, synthetic construct
  misc_feature 1..44: note = Synthetic construct
  source 1..44: mol_type = other DNA
cgtcgttgttattaaccatcactagtattatacctaggactgag

SEQ ID NO: 77 - DNA, 105 bp, synthetic construct
  misc_feature 1..105: note = Synthetic construct
  source 1..105: mol_type = other DNA
aatggtcataaatggcagcgtagcgccgcgtccgatggttaataacaacgacgattattattaattaagaagggcgctggtagagcgtcgtagggataagttcat

SEQ ID NO: 78 - DNA, 24 bp, synthetic construct
  misc_feature 1..24: note = Synthetic construct
  source 1..24: mol_type = other DNA
ctgatggttaatccataccccagc

SEQ ID NO: 79 - DNA, 25 bp, synthetic construct
  misc_feature 1..25: note = Synthetic construct
  source 1..25: mol_type = other DNA
gatgctctgcattaccaacagcgtg

SEQ ID NO: 80 - DNA, 43 bp, synthetic construct
  misc_feature 1..43: note = Synthetic construct
  source 1..43: mol_type = other DNA
agcgtcagtgagggaaatgggttttagagctagaaatagcaag

SEQ ID NO: 81 - DNA, 44 bp, synthetic construct
  misc_feature 1..44: note = Synthetic construct
  source 1..44: mol_type = other DNA
ccatttccctcactgacgctactagtattatacctaggactgag

SEQ ID NO: 82 - DNA, 93 bp, synthetic construct
  misc_feature 1..93: note = Synthetic construct
  source 1..93: mol_type = other DNA
cgacagagaaatcatcaccagcattaaaataaattattattaattgccatttccctcactgacgctcgcccatttcattgacagcgtaccggt

SEQ ID NO: 83 - DNA, 25 bp, synthetic construct
  misc_feature 1..25: note = Synthetic construct
  source 1..25: mol_type = other DNA
caatgcataagcgacagacaagtcg

SEQ ID NO: 84 - DNA, 25 bp, synthetic construct
  misc_feature 1..25: note = Synthetic construct
  source 1..25: mol_type = other DNA
catccgcgatgacgagaagcaacac

SEQ ID NO: 85 - DNA, 43 bp, synthetic construct
  misc_feature 1..43: note = Synthetic construct
  source 1..43: mol_type = other DNA
gataactatcgagacacccggttttagagctagaaatagcaag

SEQ ID NO: 86 - DNA, 44 bp, synthetic construct
  misc_feature 1..44: note = Synthetic construct
  source 1..44: mol_type = other DNA
cgggtgtctcgatagttatcactagtattatacctaggactgag

SEQ ID NO: 87 - DNA, 105 bp, synthetic construct
  misc_feature 1..105: note = Synthetic construct
  source 1..105: mol_type = other DNA
caagacacttaatcgaccaatgcccagcgatgagataactatcgagacacccgcttattattaattattagtctgccaaagtgtctccagcgaggccatattcag

SEQ ID NO: 88 - DNA, 23 bp, synthetic construct
  misc_feature 1..23: note = Synthetic construct
  source 1..23: mol_type = other DNA
caagtgtgccattcctgatcgtg

SEQ ID NO: 89 - DNA, 23 bp, synthetic construct
  misc_feature 1..23: note = Synthetic construct
  source 1..23: mol_type = other DNA
gaacccacggtgtagatactgag

SEQ ID NO: 90 - DNA, 43 bp, synthetic construct
  misc_feature 1..43: note = Synthetic construct
  source 1..43: mol_type = other DNA
gtagagcgtgaccacctgaagttttagagctagaaatagcaag

SEQ ID NO: 91 - DNA, 44 bp, synthetic construct
  misc_feature 1..44: note = Synthetic construct
  source 1..44: mol_type = other DNA
ttcaggtggtcacgctctacactagtattatacctaggactgag

SEQ ID NO: 92 - DNA, 105 bp, synthetic construct
  misc_feature 1..105: note = Synthetic construct
  source 1..105: mol_type = other DNA
aacggcagaggtcatgacatccgggctggcacctgggtagagcgtgaccacctgaatttattattaattcggatagtccacttccggcagcgccgaaacgggcag

SEQ ID NO: 93 - DNA, 24 bp, synthetic construct
  misc_feature 1..24: note = Synthetic construct
  source 1..24: mol_type = other DNA
gtcagaaagtggtgatccgtgcag

SEQ ID NO: 94 - DNA, 24 bp, synthetic construct
  misc_feature 1..24: note = Synthetic construct
  source 1..24: mol_type = other DNA
gatcgctcggcaacaagttggtcg

SEQ ID NO: 95 - DNA, 43 bp, synthetic construct
  misc_feature 1..43: note = Synthetic construct
  source 1..43: mol_type = other DNA
catcgcgataatgacaagcagttttagagctagaaatagcaag

SEQ ID NO: 96 - DNA, 44 bp, synthetic construct
  misc_feature 1..44: note = Synthetic construct
  source 1..44: mol_type = other DNA
gcttgtcattatcgcgatgactagtattatacctaggactgagt

SEQ ID NO: 97 - DNA, 108 bp, synthetic construct
  misc_feature 1..108: note = Synthetic constrtuct
  source 1..108: mol_type = other DNA
accaaccacttttggcggaaccagttgcagcatcgcgataatgacaagcaattattattaattgacagccccgagatagcgacgccattcccgacggaaataccagct

SEQ ID NO: 98 - DNA, 25 bp, synthetic construct
  misc_feature 1..25: note = Synthetic construct
  source 1..25: mol_type = other DNA
gtcacggtggttaccgaaatgccag

SEQ ID NO: 99 - DNA, 22 bp, synthetic construct
  misc_feature 1..22: note = Synthetic construct
  source 1..22: mol_type = other DNA
gcgttaaactgccctgcaccac

SEQ ID NO: 100 - DNA, 43 bp, synthetic construct
  misc_feature 1..43: note = Synthetic construct
  source 1..43: mol_type = other DNA
actccggcaccattaaccgggttttagagctagaaatagcaag

SEQ ID NO: 101 - DNA, 44 bp, synthetic construct
  misc_feature 1..44: note = Synthetic construct
  source 1..44: mol_type = other DNA
ccggttaatggtgccggagtactagtattatacctaggactgag

SEQ ID NO: 102 - DNA, 99 bp, synthetic construct
  misc_feature 1..99: note = Synthetic construct
  source 1..99: mol_type = other DNA
ttgcataaatgtcgctaatgacaatgcaatagtgacgcaccataacgtttattattaattaccggttaatggtgccggagttgatttagtgattgccat

SEQ ID NO: 103 - DNA, 22 bp, synthetic construct
  misc_feature 1..22: note = Synthetic construct
  source 1..22: mol_type = other DNA
agcgcagaacaactgcgtaata

SEQ ID NO: 104 - DNA, 22 bp, synthetic construct
  misc_feature 1..22: note = Synthetic construct
  source 1..22: mol_type = other DNA
gtacgggttgaagtttctcttg

SEQ ID NO: 105 - DNA, 43 bp, synthetic construct
  misc_feature 1..43: note = Synthetic construct
  source 1..43: mol_type = other DNA
ggcaacgatatgattcaaccgttttagagctagaaatagcaag

SEQ ID NO: 106 - DNA, 44 bp, synthetic construct
  misc_feature 1..44: note = Synthetic construct
  source 1..44: mol_type = other DNA
ggttgaatcatatcgttgccactagtattatacctaggactgag

SEQ ID NO: 107 - DNA, 102 bp, synthetic construct
  misc_feature 1..102: note = Synthetic construct
  source 1..102: mol_type = other DNA
aatgcccgcctgatattgttccaccacggccaacatttattattaattgggttgaatcatatcgttgccgatataggttgaaaattcgtaaagcaccagaca

SEQ ID NO: 108 - DNA, 21 bp, synthetic construct
  misc_feature 1..21: note = Synthetic construct
  source 1..21: mol_type = other DNA
atcgtcttatttccctcaagc

SEQ ID NO: 109 - DNA, 22 bp, synthetic construct
  misc_feature 1..22: note = Synthetic construct
  source 1..22: mol_type = other DNA
atgtgccgagtggatacaaagt

SEQ ID NO: 110 - DNA, 43 bp, synthetic construct
  misc_feature 1..43: note = Synthetic construct
  source 1..43: mol_type = other DNA
tcgctactgcaaccagtggtgttttagagctagaaatagcaag

SEQ ID NO: 111 - DNA, 44 bp, synthetic construct
  misc_feature 1..44: note = Synthetic construct
  source 1..44: mol_type = other DNA
accactggttgcagtagcgaactagtattatacctaggactgag

SEQ ID NO: 112 - DNA, 105 bp, synthetic construct
  misc_feature 1..105: note = Synthetic construct
  source 1..105: mol_type = other DNA
cgaccatggcatcggatatttatcggtccagtattattattaattgaccactggttgcagtagcgaagaggcgagctggaaggtgagggttatcatgccaatctg

SEQ ID NO: 113 - DNA, 22 bp, synthetic construct
  misc_feature 1..22: note = Synthetic construct
  source 1..22: mol_type = other DNA
ggttaacagcgctaacgccacg

SEQ ID NO: 114 - DNA, 22 bp, synthetic construct
  misc_feature 1..22: note = Synthetic construct
  source 1..22: mol_type = other DNA
gtggcgtgatgcattccgtctc

SEQ ID NO: 115 - DNA, 43 bp, synthetic construct
  misc_feature 1..43: note = Synthetic construct
  source 1..43: mol_type = other DNA
atgctattacgctctgccctgttttagagctagaaatagcaag

SEQ ID NO: 116 - DNA, 44 bp, synthetic construct
  misc_feature 1..44: note = Synthetic construct
  source 1..44: mol_type = other DNA
agggcagagcgtaatagcatactagtattatacctaggactgag

SEQ ID NO: 117 - DNA, 117 bp, synthetic construct
  misc_feature 1..117: note = Synthetic construct
  source 1..117: mol_type = other DNA
gatattttgtgccagccccatcaacaccatcacgatgcccatttattattaattgagggcagagcgtaatagcatgagttttcggcctttacggtcggcgagtccaccccaaaacgg

SEQ ID NO: 118 - DNA, 24 bp, synthetic construct
  misc_feature 1..24: note = Synthetic construct
  source 1..24: mol_type = other DNA
ggcattgaactgttgcacattcgc

SEQ ID NO: 119 - DNA, 25 bp, synthetic construct
  misc_feature 1..25: note = Synthetic construct
  source 1..25: mol_type = other DNA
catgatggcaccagagcagtatatg

SEQ ID NO: 120 - DNA, 43 bp, synthetic construct
  misc_feature 1..43: note = Synthetic construct
  source 1..43: mol_type = other DNA
gagagcaataccgaccatgagttttagagctagaaatagcaag

SEQ ID NO: 121 - DNA, 44 bp, synthetic construct
  misc_feature 1..44: note = Synthetic construct
  source 1..44: mol_type = other DNA
tcatggtcggtattgctctcactagtattatacctaggactgag

SEQ ID NO: 122 - DNA, 105 bp, synthetic construct
  misc_feature 1..105: note = Synthetic construct
  source 1..105: mol_type = other DNA
gaaaatacccagaccttgctgaataaattggcgtagaccgagagcaataccgaccatgacttattattaattggcccagcccatttgatcaacgaagcggataga

SEQ ID NO: 123 - DNA, 23 bp, synthetic construct
  misc_feature 1..23: note = Synthetic construct
  source 1..23: mol_type = other DNA
gcgtcgtcgttgagcagaacatg

SEQ ID NO: 124 - DNA, 22 bp, synthetic construct
  misc_feature 1..22: note = Synthetic construct
  source 1..22: mol_type = other DNA
gtcggtctgtggttaagcgcac

SEQ ID NO: 125 - DNA, 43 bp, synthetic construct
  misc_feature 1..43: note = Synthetic construct
  source 1..43: mol_type = other DNA
catcagttatacgctgacgggttttagagctagaaatagcaag

SEQ ID NO: 126 - DNA, 44 bp, synthetic construct
  misc_feature 1..44: note = Synthetic construct
  source 1..44: mol_type = other DNA
ccgtcagcgtataactgatgactagtattatacctaggactgag

SEQ ID NO: 127 - DNA, 105 bp, synthetic construct
  misc_feature 1..105: note = Synthetic construct
  source 1..105: mol_type = other DNA
gcgatcggctagccatccgcttaccggaataagcatttattattaattcaccgtcagcgtataactgatgatggctgattgcatcgcgagaggagaacgattaag

SEQ ID NO: 128 - DNA, 23 bp, synthetic construct
  misc_feature 1..23: note = Synthetic construct
  source 1..23: mol_type = other DNA
cgtcaattaccagcgacacagtg

SEQ ID NO: 129 - DNA, 24 bp, synthetic construct
  misc_feature 1..24: note = Synthetic construct
  source 1..24: mol_type = other DNA
cgtgcatggagaatatagagaagc

SEQ ID NO: 130 - DNA, 43 bp, synthetic construct
  misc_feature 1..43: note = Synthetic construct
  source 1..43: mol_type = other DNA
atcaggaccgcaatccccaggttttagagctagaaatagcaag

SEQ ID NO: 131 - DNA, 44 bp, synthetic construct
  misc_feature 1..44: note = Synthetic construct
  source 1..44: mol_type = other DNA
ctggggattgcggtcctgatactagtattatacctaggactgag

SEQ ID NO: 132 - DNA, 105 bp, synthetic construct
  misc_feature 1..105: note = Synthetic construct
  source 1..105: mol_type = other DNA
actgacttctgccgccgccgcaacccacatcatcaggaccgcaatccccagttattattaatttttacgccacggcgaaccgtacgctaacaggcgcttgagagt

SEQ ID NO: 133 - DNA, 24 bp, synthetic construct
  misc_feature 1..24: note = Synthetic construct
  source 1..24: mol_type = other DNA
cttgatgatgcgctttcggcggtg

SEQ ID NO: 134 - DNA, 25 bp, synthetic construct
  misc_feature 1..25: note = Synthetic construct
  source 1..25: mol_type = other DNA
cgccatatagtgtgaacgactggcc

SEQ ID NO: 135 - DNA, 43 bp, synthetic construct
  misc_feature 1..43: note = Synthetic construct
  source 1..43: mol_type = other DNA
ttcatgaagagttaagcgaggttttagagctagaaatagcaag

SEQ ID NO: 136 - DNA, 44 bp, synthetic construct
  misc_feature 1..44: note = Synthetic construct
  source 1..44: mol_type = other DNA
ctcgcttaactcttcatgaaactagtattatacctaggactgag

SEQ ID NO: 137 - DNA, 105 bp, synthetic construct
  misc_feature 1..105: note = Synthetic construct
  source 1..105: mol_type = other DNA
gagttgcacggtctgcggcacgcgacctggtcgttattattaattctcgcttaactcttcatgaaagaacgccagcagcctgaccaccggtaatggcagggagtt

SEQ ID NO: 138 - DNA, 24 bp, synthetic construct
  misc_feature 1..24: note = Synthetic construct
  source 1..24: mol_type = other DNA
cgtagcgcatatagtctggattgg

SEQ ID NO: 139 - DNA, 24 bp, synthetic construct
  misc_feature 1..24: note = Synthetic construct
  source 1..24: mol_type = other DNA
gagggtaaagtggattcgattggc

SEQ ID NO: 140 - DNA, 43 bp, synthetic construct
  misc_feature 1..43: note = Synthetic construct
  source 1..43: mol_type = other DNA
tgaatggtcgatgaccatgggttttagagctagaaatagcaag

SEQ ID NO: 141 - DNA, 44 bp, synthetic construct
  misc_feature 1..44: note = Synthetic construct
  source 1..44: mol_type = other DNA
ccatggtcatcgaccattcaactagtattatacctaggactgag

SEQ ID NO: 142 - DNA, 102 bp, synthetic construct
  misc_feature 1..102: note = Synthetic construct
  source 1..102: mol_type = other DNA
gccgttcgaactctcctgcgcgacaccctccaggcgttattattaattcaccatggtcatcgaccattcaggctccagctcgcgtaaataggtccccaacgt

SEQ ID NO: 143 - DNA, 25 bp, synthetic construct
  misc_feature 1..25: note = Synthetic construct
  source 1..25: mol_type = other DNA
cactgacgacttcagtacccagacg

SEQ ID NO: 144 - DNA, 24 bp, synthetic construct
  misc_feature 1..24: note = Synthetic construct
  source 1..24: mol_type = other DNA
cttaagtgttaccgttgatgccgc

SEQ ID NO: 145 - DNA, 43 bp, synthetic construct
  misc_feature 1..43: note = Synthetic construct
  source 1..43: mol_type = other DNA
aacttcttgtacttgtctgggttttagagctagaaatagcaag

SEQ ID NO: 146 - DNA, 45 bp, synthetic construct
  misc_feature 1..45: note = Synthetic construct
  source 1..45: mol_type = other DNA
gccagacaagtacaagaagttactagtattatacctaggactgag

SEQ ID NO: 147 - DNA, 108 bp, synthetic construct
  misc_feature 1..108: note = Synthetic construct
  source 1..108: mol_type = other DNA
tagcgccatcacactgataaatggccagcgatactgttattattaattccagacaagtacaagaagttccatgcagaaaacccggacaatgaattacagcccgcagtt

SEQ ID NO: 148 - DNA, 22 bp, synthetic construct
  misc_feature 1..22: note = Synthetic construct
  source 1..22: mol_type = other DNA
gtcgcggcaacgttggtatcag

SEQ ID NO: 149 - DNA, 25 bp, synthetic construct
  misc_feature 1..25: note = Synthetic construct
  source 1..25: mol_type = other DNA
gctgcatcaggataaagacgaaccg

SEQ ID NO: 150 - DNA, 43 bp, synthetic construct
  misc_feature 1..43: note = Synthetic construct
  source 1..43: mol_type = other DNA
ggtgagaggcgcgcgacctggttttagagctagaaatagcaag

SEQ ID NO: 151 - DNA, 44 bp, synthetic construct
  misc_feature 1..44: note = Synthetic construct
  source 1..44: mol_type = other DNA
caggtcgcgcgcctctcaccactagtattatacctaggactgag

SEQ ID NO: 152 - DNA, 108 bp, synthetic construct
  misc_feature 1..108: note = Synthetic construct
  source 1..108: mol_type = other DNA
gcccagcatgcgcaacgagaatacggtcccttattattaattccaggtcgcgcgcctctcacctggcgtcattttataatcgttcattaccacctctgttttaaattc

SEQ ID NO: 153 - DNA, 25 bp, synthetic construct
  misc_feature 1..25: note = Synthetic construct
  source 1..25: mol_type = other DNA
gttgctgatgacagaatctgggcgc

SEQ ID NO: 154 - DNA, 26 bp, synthetic construct
  misc_feature 1..26: note = Synthetic construct
  source 1..26: mol_type = other DNA
ccattccggactcacgattaagtacg

SEQ ID NO: 155 - DNA, 43 bp, synthetic construct
  misc_feature 1..43: note = Synthetic construct
  source 1..43: mol_type = other DNA
ttgcaggtcggcctgtatgggttttagagctagaaatagcaag

SEQ ID NO: 156 - DNA, 44 bp, synthetic construct
  misc_feature 1..44: note = Synthetic construct
  source 1..44: mol_type = other DNA
ccatacaggccgacctgcaaactagtattatacctaggactgag

SEQ ID NO: 157 - DNA, 108 bp, synthetic construct
  misc_feature 1..108: note = Synthetic construct
  source 1..108: mol_type = other DNA
aaggaacagactaaggctggcactgacagcagacgcaggcgtttgcaggtcggcctgtatggcttattattaattgaaagcaggcagatacatatcggttgccagaaa

SEQ ID NO: 158 - DNA, 25 bp, synthetic construct
  misc_feature 1..25: note = Synthetic construct
  source 1..25: mol_type = other DNA
cacatcacggtgccgtcgttcaaag

SEQ ID NO: 159 - DNA, 24 bp, synthetic construct
  misc_feature 1..24: note = Synthetic construct
  source 1..24: mol_type = other DNA
ccggtttacgaccataacggtcgg

SEQ ID NO: 160 - DNA, 43 bp, synthetic construct
  misc_feature 1..43: note = Synthetic construct
  source 1..43: mol_type = other DNA
atagatccagccaacacccggttttagagctagaaatagcaag

SEQ ID NO: 161 - DNA, 44 bp, synthetic construct
  misc_feature 1..44: note = Synthetic construct
  source 1..44: mol_type = other DNA
cgggtgttggctggatctatactagtattatacctaggactgag

SEQ ID NO: 162 - DNA, 99 bp, synthetic construct
  misc_feature 1..99: note = Synthetic construct
  source 1..99: mol_type = other DNA
cagatcgtgcttaccgctgcgatccaccagtgcatattcatagatccagccaacacccgtttattattaattatctggccccagctcggcgctgactcc

SEQ ID NO: 163 - DNA, 22 bp, synthetic construct
  misc_feature 1..22: note = Synthetic construct
  source 1..22: mol_type = other DNA
ggtgattaccgttgatgccgac

SEQ ID NO: 164 - DNA, 24 bp, synthetic construct
  misc_feature 1..24: note = Synthetic construct
  source 1..24: mol_type = other DNA
gagaaaccagtcctgtaatgagcg

SEQ ID NO: 165 - DNA, 20 bp, synthetic construct
  misc_feature 1..20: note = Synthetic construct
  source 1..20: mol_type = other DNA
tgtcacatggagttggcagg

SEQ ID NO: 166 - DNA, 20 bp, synthetic construct
  misc_feature 1..20: note = Synthetic construct
  source 1..20: mol_type = other DNA
cttaccatgtcgcgctgatc

SEQ ID NO: 167 - DNA, 22 bp, synthetic construct
  misc_feature 1..22: note = Synthetic construct
  source 1..22: mol_type = other DNA
caggtagctggtgaagacgaag

SEQ ID NO: 168 - DNA, 22 bp, synthetic construct
  misc_feature 1..22: note = Synthetic construct
  source 1..22: mol_type = other DNA
caggcgcttttcgtaattcatc

SEQ ID NO: 169 - DNA, 22 bp, synthetic construct
  misc_feature 1..22: note = Synthetic construct
  source 1..22: mol_type = other DNA
cccaccattcagagaagaaacc

SEQ ID NO: 170 - DNA, 22 bp, synthetic construct
  misc_feature 1..22: note = Synthetic construct
  source 1..22: mol_type = other DNA
ccatcaaaaaaccaggcttgag

SEQ ID NO: 171 - DNA, 22 bp, synthetic construct
  misc_feature 1..22: note = Synthetic construct
  source 1..22: mol_type = other DNA
gcattctgtaacaaagcgggac

SEQ ID NO: 172 - DNA, 20 bp, synthetic construct
  misc_feature 1..20: note = Synthetic construct
  source 1..20: mol_type = other DNA
gctcaacggcctcaacctac

SEQ ID NO: 173 - DNA, 20 bp, synthetic construct
  misc_feature 1..20: note = Synthetic construct
  source 1..20: mol_type = other DNA
ccaactcagcttcctttcgg

SEQ ID NO: 174 - DNA, 22 bp, synthetic construct
  misc_feature 1..22: note = Synthetic construct
  source 1..22: mol_type = other DNA
cagttcgaaatcaagcgaggag

SEQ ID NO: 175 - DNA, 34 bp, synthetic construct
  misc_feature 1..34: note = Synthetic construct
  source 1..34: mol_type = other DNA
ggaattccatatgaacaaaaacagagggtttacg

SEQ ID NO: 176 - DNA, 30 bp, synthetic construct
  misc_feature 1..30: note = Synthetic construct
  source 1..30: mol_type = other DNA
ccgctcgagtcaatgatgatcgacagtatg

SEQ ID NO: 177 - DNA, 27 bp, synthetic construct
  misc_feature 1..27: note = Synthetic construct
  source 1..27: mol_type = other DNA
cctgttggtggatgccgccatcgttgt

SEQ ID NO: 178 - DNA, 29 bp, synthetic construct
  misc_feature 1..29: note = Synthetic construct
  source 1..29: mol_type = other DNA
ccacaacgatggcggcatccaccaacagg

SEQ ID NO: 179 - DNA, 29 bp, synthetic construct
  misc_feature 1..29: note = Synthetic construct
  source 1..29: mol_type = other DNA
gctcatatggcgaatttctttattgatcg

SEQ ID NO: 180 - DNA, 29 bp, synthetic construct
  misc_feature 1..29: note = Synthetic construct
  source 1..29: mol_type = other DNA
tatctcgagttattccgggcgcggcttca

SEQ ID NO: 181 - DNA, 35 bp, synthetic construct
  misc_feature 1..35: note = Synthetic construct
  source 1..35: mol_type = other DNA
ggaattccatatgacgaaacatgccaggtttttcc

SEQ ID NO: 182 - DNA, 30 bp, synthetic construct
  misc_feature 1..30: note = Synthetic construct
  source 1..30: mol_type = other DNA
ccgctcgagttatcctttaaagcaacggcg

SEQ ID NO: 183 - DNA, 30 bp, synthetic construct
  misc_feature 1..30: note = Synthetic construct
  source 1..30: mol_type = other DNA
ggaattccatatgagcgcaaatgcggagac

SEQ ID NO: 184 - DNA, 26 bp, synthetic construct
  misc_feature 1..26: note = Synthetic construct
  source 1..26: mol_type = other DNA
ccgctcgagttagtgcgcaccgcctc

SEQ ID NO: 185 - DNA, 42 bp, synthetic construct
  misc_feature 1..42: note = Synthetic construct
  source 1..42: mol_type = other DNA
ggaattccatatggaacagattaattcaaataaaaaacattc

SEQ ID NO: 186 - DNA, 28 bp, synthetic construct
  misc_feature 1..28: note = Synthetic construct
  source 1..28: mol_type = other DNA
ccgggatcctcacccaacgcctttcgct

SEQ ID NO: 187 - DNA, 26 bp, synthetic construct
  misc_feature 1..26: note = Synthetic construct
  source 1..26: mol_type = other DNA
gaccatatgaacagaagaagaaagct

SEQ ID NO: 188 - DNA, 28 bp, synthetic construct
  misc_feature 1..28: note = Synthetic construct
  source 1..28: mol_type = other DNA
atactcgagttacgcttttttaaagcgg

SEQ ID NO: 189 - DNA, 30 bp, synthetic construct
  misc_feature 1..30: note = Synthetic construct
  source 1..30: mol_type = other DNA
gtccatatgcaggtgttacccccgagcagc

SEQ ID NO: 190 - DNA, 32 bp, synthetic construct
  misc_feature 1..32: note = Synthetic construct
  source 1..32: mol_type = other DNA
gttctcgagttactcggttaccgtttgtttag

SEQ ID NO: 191 - DNA, 29 bp, synthetic construct
  misc_feature 1..29: note = Synthetic construct
  source 1..29: mol_type = other DNA
ggaattccatatgaaaaagcggaaaaccg

SEQ ID NO: 192 - DNA, 27 bp, synthetic construct
  misc_feature 1..27: note = Synthetic construct
  source 1..27: mol_type = other DNA
ccgctcgagttactctcgtgccagagc

SEQ ID NO: 193 - DNA, 26 bp, synthetic construct
  misc_feature 1..26: note = Synthetic construct
  source 1..26: mol_type = other DNA
gtaccatatgaacccttatatttatc

SEQ ID NO: 194 - DNA, 28 bp, synthetic construct
  misc_feature 1..28: note = Synthetic construct
  source 1..28: mol_type = other DNA
gtacctcgagttaatgtggtgtgcttcg

SEQ ID NO: 195 - DNA, 31 bp, synthetic construct
  misc_feature 1..31: note = Synthetic construct
  source 1..31: mol_type = other DNA
gtccatatggtgcagaagtatatcagtgaag

SEQ ID NO: 196 - DNA, 30 bp, synthetic construct
  misc_feature 1..30: note = Synthetic construct
  source 1..30: mol_type = other DNA
gtcctcgagttagcgggatgctcgttgcag

SEQ ID NO: 197 - DNA, 31 bp, synthetic construct
  misc_feature 1..31: note = Listing
  source 1..31: mol_type = other DNA
ggaattccatatggctgatttgcgtgcaata

SEQ ID NO: 198 - DNA, 26 bp, synthetic construct
  misc_feature 1..26: note = Synthetic construct
  source 1..26: mol_type = other DNA
ctataagctttcactccccggccgaa

SEQ ID NO: 199 - protein, 8 aa, synthetic construct
MPNFFIDR

SEQ ID NO: 200 - protein, 8 aa, synthetic construct
MANFFIDR

SEQ ID NO: 201 - protein, 8 aa, synthetic construct
MANFFIRR

SEQ ID NO: 202 - protein, 8 aa, synthetic construct
MANYFIDR

SEQ ID NO: 203 - protein, 8 aa, synthetic construct
MTPLLELK

SEQ ID NO: 204 - protein, 8 aa, synthetic construct
MQQQKPLE

SEQ ID NO: 205 - protein, 8 aa, synthetic construct
MSRFLICS

SEQ ID NO: 206 - protein, 8 aa, synthetic construct
MQKYISEA

SEQ ID NO: 207 - protein, 8 aa, synthetic construct
MTTRQHSS

SEQ ID NO: 208 - protein, 8 aa, synthetic construct
MTTNTVSR

SEQ ID NO: 209 - protein, 8 aa, synthetic construct
MPRFFTRH

SEQ ID NO: 210 - protein, 8 aa, synthetic construct
MITIPITL

SEQ ID NO: 211 - protein, 8 aa, synthetic construct
MPKVQADG

SEQ ID NO: 212 - protein, 8 aa, synthetic construct
MNPYIYLG

SEQ ID NO: 213 - protein, 8 aa, synthetic construct
MTDLPDST

SEQ ID NO: 214 - protein, 8 aa, synthetic construct
MSWIILVI

SEQ ID NO: 215 - protein, 8 aa, synthetic construct
MSRTTTVD

SEQ ID NO: 216 - protein, 8 aa, synthetic construct
MKRQRNVN

SEQ ID NO: 217 - protein, 8 aa, synthetic construct
MNLSLRRS

SEQ ID NO: 218 - protein, 8 aa, synthetic construct
MYIYWILL

SEQ ID NO: 219 - protein, 8 aa, synthetic construct
MKNPYFPT

SEQ ID NO: 220 - protein, 8 aa, synthetic construct
MQVLPPSS

SEQ ID NO: 221 - protein, 8 aa, synthetic construct
MRLFAQLS

SEQ ID NO: 222 - protein, 8 aa, synthetic construct
MAITKSTP

SEQ ID NO: 223 - protein, 8 aa, synthetic construct
MQNKLASG

SEQ ID NO: 224 - protein, 8 aa, synthetic construct
MAMSEQPQ

SEQ ID NO: 225 - protein, 8 aa, synthetic construct
MSPCENDT

SEQ ID NO: 226 - protein, 8 aa, synthetic construct
MSRVSQAR

SEQ ID NO: 227 - protein, 8 aa, synthetic construct
MSDKKKRS

SEQ ID NO: 228 - protein, 8 aa, synthetic construct
MRSFSQLW

SEQ ID NO: 229 - protein, 8 aa, synthetic construct
MSALNSLP

SEQ ID NO: 230 - protein, 8 aa, synthetic construct
MELLVLVW

SEQ ID NO: 231 - protein, 8 aa, synthetic construct
MQPGKRFL

SEQ ID NO: 232 - protein, 8 aa, synthetic construct
MIEWIIRR

SEQ ID NO: 233 - protein, 8 aa, synthetic construct
MNPYIYLG

SEQ ID NO: 234 - protein, 8 aa, synthetic construct
MKRQRNVN

SEQ ID NO: 235 - protein, 8 aa, synthetic construct
MYIYWILL

SEQ ID NO: 236 - protein, 8 aa, synthetic construct
MKNPYFPT

SEQ ID NO: 237 - protein, 8 aa, synthetic construct
MQVLPPSS

SEQ ID NO: 238 - protein, 8 aa, synthetic construct
MAMSEQPQ

SEQ ID NO: 239 - protein, 8 aa, synthetic construct
MSPCENDT

SEQ ID NO: 240 - protein, 8 aa, synthetic construct
MSRVSQAR

SEQ ID NO: 241 - protein, 8 aa, synthetic construct
MSDKKKRS

SEQ ID NO: 242 - protein, 8 aa, synthetic construct
MQPGKRFL

SEQ ID NO: 243 - protein, 8 aa, synthetic construct
MIEWIIRR

SEQ ID NO: 244 - protein, 4 aa, synthetic construct
GFTN

SEQ ID NO: 245 - protein, 4 aa, synthetic construct
PISN

SEQ ID NO: 246 - protein, 4 aa, synthetic construct
GNGN

SEQ ID NO: 247 - protein, 4 aa, synthetic construct
QTNN

SEQ ID NO: 248 - protein, 4 aa, synthetic construct
DYPN

SEQ ID NO: 249 - protein, 4 aa, synthetic construct
PVVN

SEQ ID NO: 250 - protein, 4 aa, synthetic construct
SALN

SEQ ID NO: 251 - protein, 4 aa, synthetic construct
GWAN

SEQ ID NO: 252 - protein, 4 aa, synthetic construct
LTVN

SEQ ID NO: 253 - protein, 4 aa, synthetic construct
PAFN

SEQ ID NO: 254 - protein, 4 aa, synthetic construct
GPDN

SEQ ID NO: 255 - DNA, 4631658 bp, synthetic construct (residues 1-1,543,886 of 4,631,658)
  source 1..4631658: mol_type = other DNA
agcttttcattctgactgcaacgggcaatatgtctctgtgtggattaaaaaaagagtgtctgatagcagcttctgaactggttacctgccgtgagtaaattaaaattttattgacttaggtcactaaatactttaaccaatataggcatagcgcacagacagataaaaattacagagtacacaacatccatgaaacgcattagcaccaccattaccaccaccatcaccattaccacaggtaacggtgcgggctgacgcgtacaggaaacacagaaaaaagcccgcacctgacagtgcgggctttttttttcgaccaaaggtaacgaggtaacaaccatgcgagtgttgaagttcggcggtacatcagtggcaaatgcagaacgttttctgcgtgttgccgatattctggaaagcaatgccaggcaggggcaggtggccaccgtcctctctgcccccgccaaaatcaccaaccacctggtggcgatgattgaaaaaaccattagcggccaggatgctttacccaatatcagcgatgccgaacgtatttttgccgaacttttgacgggactcgccgccgcccagccggggttcccgctggcgcaattgaaaactttcgtcgatcaggaatttgcccaaataaaacatgtcctgcatggcattagtttgttggggcagtgcccggatagcatcaacgctgcgctgatttgccgtggcgagaaaatgtcgatcgccattatggccggcgtattagaagcgcgcggtcacaacgttactgttatcgatccggtcgaaaaactgctggcagtggggcattacctcgaatctaccgtcgatattgctgagtccacccgccgtattgcggcaagccgcattccggctgatcacatggtgctgatggcaggtttcaccgccggtaatgaaaaaggcgaactggtggtgcttggacgcaacggttccgactactctgctgcggtgctggctgcctgtttacgcgccgattgttgcgagatttggacggacgttgacggggtctatacctgcgacccgcgtcaggtgcccgatgcgaggttgttgaagtcgatgtcctaccaggaagcgatggagctttcctacttcggcgctaaagttcttcacccccgcaccattacccccatcgcccagttccagatcccttgcctgattaaaaataccggaaatcctcaagcaccaggtacgctcattggtgccagccgtgatgaagacgaattaccggtcaagggcatttccaatctgaataacatggcaatgttcagcgtttctggtccggggatgaaagggatggtcggcatggcggcgcgcgtctttgcagcgatgtcacgcgcccgtatttccgtggtgctgattacgcaatcatcttccgaatacagcatcagtttctgcgttccacaaagcgactgtgtgcgagctgaacgggcaatgcaggaagagttctacctggaactgaaagaaggcttactggagccgctggcagtgacggaacggctggccattatctcggtggtaggtgatggtatgcgcaccttgcgtgggatctcggcgaaattctttgccgcactggcccgcgccaatatcaacattgtcgccattgctcagggatcttctgaacgctcaatctctgtcgtggtaaataacgatgatgcgaccactggcgtgcgcgttactcatcagatgctgttcaataccgatcaggttatcgaagtgtttgtgattggcgtcggtggcgttggcggtgcgctgctggagcaactgaagcgtcagcaaagctggctgaagaataaacatatcgacttacgtgtctgcggtgttgccaactcgaaggctctgctcaccaatgtacatggccttaatctggaaaactggcaggaagaactggcgcaagccaaagagccgtttaatctcgggcgcttaattcgcctcgtgaaagaatatcatctgctgaacccggtcattgttgactgcacttccagccaggcagtggcggatcaatatgccgacttcctgcgcgaaggtttccacgttgtcacgccgaacaaaaaggccaacacctcgtcgatggattactaccatcagttgcgttatgcggcggaaaaatcgcggcgtaaattcctctatgacaccaacgttggggctggattaccggttattgagaacctgcaaaatctgctcaatgcaggtgatgaattgatgaagttctccggcattctttctggttcgctttcttatatcttcggcaagttagacgaaggcatgagtttctccgaggcgaccacgctggcgcgggaaatgggttataccgaaccggacccgcgagatgatctttctggtatggatgtggcgcgtaaactattgattctcgctcgtgaaacgggacgtgaactggagctggcggatattgaaattgaacctgtgctgcccgcagagtttaacgccgagggtgatgttgccgcttttatggcgaatctgtcacaactcgacgatctctttgccgcgcgcgtggcgaaggcccgtgatgaaggaaaagttttgcgctatgttggcaatattgatgaagatggcgtctgccgcgtgaagattgccgaagtggatggtaatgatccgctgttcaaagtgaaaaatggcgaaaacgccctggccttctatagccactattatcagccgctgccgttggtactgcgcggatatggtgcgggcaatgacgttacagctgccggtgtctttgctgatctgctacgtaccctctcatggaagttaggagtctgacatggttaaagtttatgccccggcttccagtgccaatatgagcgtcgggtttgatgtgctcggggcggcggtgacacctgttgatggtgcattgctcggagatgtagtcacggttgaggcggcagagacattcagtctcaacaacctcggacgctttgccgataagctgccgtcagaaccacgggaaaatatcgtttatcagtgctgggagcgtttttgccaggaactgggtaagcaaattccagtggcgatgaccctggaaaagaatatgccgatcggttcgggcttaggctccagtgcctgttcggtggtcgcggcgctgatggcgatgaatgaacactgcggcaagccgcttaatgacactcgtttgctggctttgatgggcgagctggaaggccgtatctccggcagcattcattacgacaacgtggcaccgtgttttctcggtggtatgcagttgatgatcgaagaaaacgacatcatcagccagcaagtgccagggtttgatgagtggctgtgggtgctggcgtatccggggattaaagtctcgacggcagaagccagggctattttaccggcgcagtatcgccgccaggattgcattgcgcacgggcgacatctggcaggcttcattcacgcctgctattcccgtcagcctgagcttgccgcgaagctgatgaaagatgttatcgctgaaccctaccgtgaacggttactgccaggcttccggcaggcgcggcaggcggtcgcggaaatcggcgcggtagcgagcggtatctccggctccggcccgaccttgttcgctctgtgtgacaagccggaaaccgcccagcgcgttgccgactggttgggtaagaactacctgcaaaatcaggaaggttttgttcatatttgccggctggatacggcgggcgcacgagtactggaaaactaaatgaaactctacaatctgaaagatcacaacgagcaggtcagctttgcgcaagccgtaacccaggggttgggcaaaaatcaggggctgttttttccgcacgacctgccggaattcagcctgactgaaattgatgagatgctgaagctggattttgtcacccgcagtgcgaagatcctctcggcgtttattggtgatgaaatcccacaggaaatcctggaagagcgcgtgcgcgcggcgtttgccttcccggctccggtcgccaatgttgaaagcgatgtcggttgtctggaattgttccacgggccaacgctggcatttaaagatttcggcggtcgctttatggcacaaatgctgacccatattgcgggtgataagccagtgaccattctgaccgcgacctccggtgataccggagcggcagtggctcatgctttctacggtttaccgaatgtgaaagtggttatcctctatccacgaggcaaaatcagtccactgcaagaaaaactgttctgtacattgggcggcaatatcgaaactgttgccatcgacggcgatttcgatgcctgtcaggcgctggtgaagcaggcgtttgatgatgaagaactgaaagtggcgctagggttaaactcggctaactcgattaacatcagccgtttgctggcgcagatttgctactactttgaagctgttgcgcagctgccgcaggagacgcgcaaccagctggttgtctcggtgccaagcggaaacttcggcgatttgacggcgggtctgctggcgaagtcactcggtctgccggtgaaacgttttattgctgcgaccaacgtgaacgataccgtgccacgtttcctgcacgacggtcagtggtcacccaaagcgactcaggcgacgttatccaacgcgatggacgtgagtcagccgaacaactggccgcgtgtggaagagttgttccgccgcaaaatctggcaactgaaagagctgggttatgcagccgtggatgatgaaaccacgcaacagacaatgcgtgagttaaaagaactgggctacacttcggagccgcacgctgccgtagcttatcgtgcgctgcgtgatcagttgaatccaggcgaatatggcttgttcctcggcaccgcgcatccggcgaaatttaaagagagcgtggaagcgattctcggtgaaacgttggatctgccaaaagagctggcagaacgtgctgatttacccttgctttcacataatctgcccgccgattttgctgcgttgcgtaaattgatgatgaatcatcagtaaaatctattcattatctcaatcaggccgggtttgcttttatgcagcccggcttttttatgaagaaattatggagaaaaatgacagggaaaaaggagaaattctcaataaatgcggtaacttagagattaggattgcggagaataacaaccgccgttctcatcgagtaatctccggatatcgacccataacgggcaatgataaaaggagtaacctgtgaaaaagatgcaatctatcgtactcgcactttccctggttctggtcgctcccatggcagcacaggctgcggaaattacgttagtcccgtcagtaaaattacagataggcgatcgtgataatcgtggctattactgggatggaggtcactggcgcgaccacggctggtggaaacaacattatgaatggcgaggcaatcgctggcacctacacggaccgccgccaccgccgcgccaccataagaaagctcctcatgatcatcacggcggtcatggtccaggcaaacatcaccgctaaatgacaaatgccgggtaacaatccggcattcagcgcctgatgcgacgctggcgcgtcttatcaggcctacgttaattctgcaatatattgaatctgcatgcttttgtaggcaggataaggcgttcacgccgcatccggcattgactgcaaacttaacgctgctcgtagcgtttaaacaccagttcgccattgctggaggaatcttcatcaaagaagtaaccttcgctattaaaaccagtcagttgctctggtttggtcagccgattttcaataatgaaacgactcatcagaccgcgtgctttcttagcgtagaagctgatgatcttaaatttgccgttcttctcatcgaggaacaccggcttgataatctcggcattcaatttcttcggcttcaccgatttaaaatactcatctgacgccagattaatcaccacattatcgccttgtgctgcgagcgcctcgttcagcttgttggtgatgatatctccccagaattgatacagatctttccctcgggcattctcaagacggatccccatttccagacgataaggctgcattaaatcgagcgggcggagtacgccatacaagccggaaagcattcgcaaatgctgttgggcaaaatcgaaatcgtcttcgctgaaggtttcggcctgcaagccggtgtagacatcacctttaaacgccagaatcgcctggcgggcattcgccggcgtgaaatctggctgccagtcatgaaagcgagcggcgttgatacccgccagtttgtcgctgatgcgcatcagcgtgctaatctgcggaggcgtcagtttccgcgcctcatggatcaactgctgggaattgtctaacagctccggcagcgtatagcgcgtggtggtcaacgggctttggtaatcaagcgttttcgcaggtgaaataagaatcagcatatccagtccttgcaggaaatttatgccgactttagcaaaaaatgagaatgagttgatcgatagttgtgattactcctgcgaaacatcatcccacgcgtccggagaaagctggcgaccgatatccggataacgcaatggatcaaacaccgggcgcacgccgagtttacgctggcgtagataatcactggcaatggtatgaaccacaggcgagagcagtaaaatggcggtcaaattggtaatagccatgcaggccattatgatatctgccagttgccacatcagcggaaggcttagcaaggtgccgccgatgaccgttgcgaaggtgcagatccgcaaacaccagatcgctttagggttgttcaggcgtaaaaagaagagattgttttcggcataaatgtagttggcaacgatggagctgaaggcaaacagaataaccacaagggtaacaaactcagcaccccaggaacccattagcacccgcatcgccttctggataagctgaataccttccagcggcatgtaggttgtgccgttacccgccagtaatatcagcatggcgcttgccgtacagatgaccagggtgtcgataaaaatgccaatcatctggacaatcccttgcgctgccggatgcggaggccaggacgccgctgccgctgccgcgtttggcgtcgaacccattcccgcctcattggaaaacatactgcgctgaaaaccgttagtaatcgcctggcttaaggtatatcccgccgcgccgcctgccgcttcctgccagccaaaagcactctcaaaaatagaccaaatgacgtggggaagttgcccgatattcattacgcaaattaccaggctggtcagtacccagattatcgccatcaacgggacaaagccctgcatgagccgggcgacgccatgaagaccgcgagtgattgccagcagagtaaagacagcgagaataatgcctgtcaccagcgggggaaaatcaaaagaaaaactcagggcgcgggcaacggcgttcgcttgaactccgctgaaaattatgccataggcgatgagcaaaaagacggcgaacagaacgcccatccagcgcatccccagcccgcgcgccatataccatgccggtccgccacgaaactgcccattgacgtcacgttctttataaagttgtgccagagaacattcggcaaacgaggtcgccatgccgataaacgcggcaacccacatccaaaagacggctccaggtccaccggcggtaatagccagcgcaacgccggccaggttgccgctacccacgcgcgccgcaagactggtacacaatgactgaaatgaggttaaaccgcctggctgtggatgaatgctatttttaagacttttgccaaactggcggatgtagcgaaactgcacaaatccggtgcgaaaagtgaaccaacaacctgcgccgaagagcaggtaaatcattaccgatccccaaaggacgctgttaatgaaggagaaaaaatctggcatgcatatccctcttattgccggtcgcgatgactttcctgtgtaaacgttaccaattgtttaagaagtatatacgctacgaggtacttgataacttctgcgtagcatacatgaggttttgtataaaaatggcgggcgatatcaacgcagtgtcagaaatccgaaacagtctcgcctggcgataaccgtcttgtcggcggttgcgctgacgttgcgtcgtgatatcatcagggcagaccggttacatccccctaacaagctgtttaaagagaaatactatcatgacggacaaattgacctcccttcgtcagtacaccaccgtagtggccgacactggggacatcgcggcaatgaagctgtatcaaccgcaggatgccacaaccaacccttctctcattcttaacgcagcgcagattccggaataccgtaagttgattgatgatgctgtcgcctgggcgaaacagcagagcaacgatcgcgcgcagcagatcgtggacgcgaccgacaaactggcagtaaatattggtctggaaatcctgaaactggttccgggccgtatctcaactgaagttgatgcgcgtctttcctatgacaccgaagcgtcaattgcgaaagcaaaacgcctgatcaaactctacaacgatgctggtattagcaacgatcgtattctgatcaaactggcttctacctggcagggtatccgtgctgcagaacagctggaaaaagaaggcatcaactgtaacctgaccctgctgttctccttcgctcaggctcgtgcttgtgcggaagcgggcgtgttcctgatctcgccgtttgttggccgtattcttgactggtacaaagcgaataccgataagaaagagtacgctccggcagaagatccgggcgtggtttctgtatctgaaatctaccagtactacaaagagcacggttatgaaaccgtggttatgggcgcaagcttccgtaacatcggcgaaattctggaactggcaggctgcgaccgtctgaccatcgcaccggcactgctgaaagagctggcggagagcgaaggggctatcgaacgtaaactgtcttacaccggcgaagtgaaagcgcgtccggcgcgtatcactgagtccgagttcctgtggcagcacaaccaggatccaatggcagtagataaactggcggaaggtatccgtaagtttgctattgaccaggaaaaactggaaaaaatgatcggcgatctgctgtaatcattcttagcgtgaccgggaagtcggtcacgctacctcttctgaagcctgtctgtcactcccttcgcagtgtatcattctgtttaacgagactgtttaaacggaaaaatcttgatgaatactttacgtattggcttagtttccatctctgatcgcgcatccagcggcgtttatcaggataaaggcatccctgcgctggaagaatggctgacatcggcgctaaccacgccgtttgaactggaaacccgcttaatccccgatgagcaggcgatcatcgagcaaacgttgtgtgagctggtggatgaaatgagttgccatctggtgctcaccacgggcggaactggcccggcgcgtcgtgacgtaacgcccgatgcgacgctggcagtagcggaccgcgagatgcctggctttggtgaacagatgcgccagatcagcctgcattttgtaccaactgcgatcctttcgcgtcaggtgggcgtgattcgcaaacaggcgctgatccttaacttacccggtcagccgaagtctattaaagagacgctggaaggtgtgaaggacgctgagggtaacgttgtggtacacggtatttttgccagcgtaccgtactgcattcagttgctggaagggccatacgttgaaacggcaccggaagtggttgcagcattcagaccgaagagtgcaagacgcgacgttagcgaataaaaaaatccccccgagcggggggatctcaaaacaattagtgggattcaccaatcggcagaacggtgcgaccaaactgctcgttcagtacttcacccatcgccagatagattgcgctggcaccgcagatcagcccaatccagccggcaaagtggatgattgcggcgttaccggcaatgttaccgatcgccagcagggcaaacagcacggtcaggctaaagaaaacgaattgcagaacgcgtgcgcctttcagcgtgccgaagaacataaacagcgtaaatacgccccacagacccaggtagacaccaaggaactgtgcatttggcgcatcggtcagacccagtttcggcatcagcagaatcgcaaccagcgtcagccagaaagaaccgtaagaggtgaatgcggttaaaccgaaagtgttgccttttttgtactccagcagaccagcaaaaatttgcgcgatgccgccgtagaaaatgcccatggcaagaataataccgtccagagcgaaataacccacgttgtgcaggttaagcagaatggtggtcatgccgaagcccatcaggcccagcggtgccggattagccaacttagtgttgcccataattcctcaaaaatcatcatcgaatgaatggtgaaataatttccctgaataactgtagtgttttcagggcgcggcataataatcagccagtggggcagtgtctacgatcttttgaggggaaaatgaaaattttccccggtttccggtatcagacctgagtggcgctaaccatccggcgcaggcaggcgatttgcagtacggctggaatcgtcacgcgataggcgctgccgctgaccgctttaaccccatttagtgccgcacctacagggcctcccagccccgcgccgcgcagcaaaccatgcccaagtacgctcattgctgcgtgggtgcgtaaaatgcgggtcagttggctggaaagcaaatgcgacacaccttttgccaataatttgtctttcatcagcagcggcagcagctcttccagctcattcaccctggcatcgaccgcgtgcagaaactcctgcttatgttcctcgtccattttcttccaggtattacgcagaaattgttccagtaactgttgctcaatttcaaacgtagacatctctttgtcggctttcagcttcaatcgctttgaaacatcgagcaaaatggcccgatacaatttaccgtgtccgcgcagtttgttggcgatactatcgccaccaaaatgctgtaattctccggcaatcagctgccagttgcggcgatgttgctcgggatgcccttccatcgatttaaacagttcgttgcgcatcagtacgctggagaggcgagttttgcctttttcattatgggtgagcaatcgggcgaaatttgccaactgttcctcactacaatgctgaagaaaatccagatctgaatcattcaggtaattaacattcattttttgtggcttctatattctggcgttagtcgtcgccgataattttcagcgtggccatatccgatgagttcaccgtatgacccgaaaaggtgatttttgagacgcagcgtttattgtcgttatcgctgttaatgttgatccagtcagtggtttgcccttcttttatttctgaaggaatattcaggctctgactggcgctacgggcggctttgaaataaaccgatgcaccgcttaactgtaaatcgccatggtcggcagagagttgtatgcgtttcacaatgcgacaaacaggaagtttcagcgccagatcgttggtttcgttacgcggcattgcaatggcgccgaggagtttatggtcgtttgcctgcgccgtgcagcacagcatcaggctaatcgccaggctggcggaaatcgtaaaaacggatttcataaggattctcttagtgggaagaggtagggggatgaatacccactagtttactgctgataaagagaagattcaggcacgtaatcttttctttttattacaattttttgatgaatgccttggctgcgattcattctttatatgaataaaattgctgtcaattttacgtcttgtcctgccatatcgcgaaatttctgcgcaaaagcacaaaaaatttttgcatctcccccttgatgacgtggtttacgaccccatttagtagtcaaccgcagtgagtgagtctgcaaaaaaatgaaattgggcagttgaaaccagacgtttcgcccctattacagactcacaaccacatgatgaccgaatatatagtggagacgtttagatgggtaaaataattggtatcgacctgggtactaccaactcttgtgtagcgattatggatggcaccactcctcgcgtgctggagaacgccgaaggcgatcgcaccacgccttctatcattgcctatacccaggatggtgaaactctagttggtcagccggctaaacgtcaggcagtgacgaacccgcaaaacactctgtttgcgattaaacgcctgattggtcgccgcttccaggacgaagaagtacagcgtgatgtttccatcatgccgttcaaaattattgctgctgataacggcgacgcatgggtcgaagttaaaggccagaaaatggcaccgccgcagatttctgctgaagtgctgaaaaaaatgaagaaaaccgctgaagattacctgggtgaaccggtaactgaagctgttatcaccgtaccggcatactttaacgatgctcagcgtcaggcaaccaaagacgcaggccgtatcgctggtctggaagtaaaacgtatcatcaacgaaccgaccgcagctgcgctggcttacggtctggacaaaggcactggcaaccgtactatcgcggtttatgacctgggtggtggtactttcgatatttctattatcgaaatcgacgaagttgacggcgaaaaaaccttcgaagttctggcaaccaacggtgatacccacctggggggtgaagacttcgacagccgtctgatcaactatctggttgaagaattcaagaaagatcagggcattgacctgcgcaacgatccgctggcaatgcagcgcctgaaagaagcggcagaaaaagcgaaaatcgaactgtcttccgctcagcagaccgacgttaacctgccatacatcactgcagacgcgaccggtccgaaacacatgaacatcaaagtgactcgtgcgaaactggaaagcctggttgaagatctggtaaaccgttccattgagccgctgaaagttgcactgcaggacgctggcctgtccgtatctgatatcgacgacgttatcctcgttggtggtcagactcgtatgccaatggttcagaagaaagttgctgagttctttggtaaagagccgcgtaaagacgttaacccggacgaagctgtagcaatcggtgctgctgttcagggtggtgttctgactggtgacgtaaaagacgtactgctgctggacgttaccccgctgtctctgggtatcgaaaccatgggcggtgtgatgacgacgctgatcgcgaaaaacaccactatcccgaccaagcacagccaggtgttctctaccgctgaagacaaccagtctgcggtaaccatccatgtgctgcagggtgaacgtaaacgtgcggctgataacaaatctctgggtcagttcaacctagatggtatcaacccggcaccgcgcggcatgccgcagatcgaagttaccttcgatatcgatgctgacggtatcctgcacgtttccgcgaaagataaaaacagcggtaaagagcagaagatcaccatcaaggcttcttctggtctgaacgaagatgaaatccagaaaatggtacgcgacgcagaagctaacgccgaagctgaccgtaagtttgaagagctggtacagactcgcaaccagggcgaccatctgctgcacagcacccgtaagcaggttgaagaagcaggcgacaaactgccggctgacgacaaaactgctatcgagtctgcgctgactgcactggaaactgctctgaaaggtgaagacaaagccgctatcgaagcgaaaatgcaggaactggcacaggtttcccagaaactgatggaaatcgcccagcagcaacatgcccagcagcagactgccggtgctgatgcttctgcaaacaacgcgaaagatgacgatgttgtcgacgctgaatttgaagaagtcaaagacaaaaaataatcgccctataaacgggtaattatactgacacgggcgaaggggaatttcctctccgcccgtgcattcatctaggggcaatttaaaaaagatggctaagcaagattattacgagattttaggcgtttccaaaacagcggaagagcgtgaaatcagaaaggcctacaaacgcctggccatgaaataccacccggaccgtaaccagggtgacaaagaggccgaggcgaaatttaaagagatcaaggaagcttatgaagttctgaccgactcgcaaaaacgtgcggcatacgatcagtatggtcatgctgcgtttgagcaaggtggcatgggcggcggcggttttggcggcggcgcagacttcagcgatatttttggtgacgttttcggcgatatttttggcggcggacgtggtcgtcaacgtgcggcgcgcggtgctgatttacgctataacatggagctcaccctcgaagaagctgtacgtggcgtgaccaaagagatccgcattccgactctggaagagtgtgacgtttgccacggtagcggtgcaaaaccaggtacacagccgcagacttgtccgacctgtcatggttctggtcaggtgcagatgcgccagggattcttcgctgtacagcagacctgtccacactgtcagggccgcggtacgctgatcaaagatccgtgcaacaaatgtcatggtcatggtcgtgttgagcgcagcaaaacgctgtccgttaaaatcccggcaggggtggacactggagaccgcatccgtcttgcgggcgaaggtgaagcgggcgagcatggcgcaccggcaggcgatctgtacgttcaggttcaggttaaacagcacccgattttcgagcgtgaaggcaacaacctgtattgcgaagtcccgatcaacttcgctatggcggcgctgggtggcgaaatcgaagtaccgacccttgatggtcgcgtcaaactgaaagtgcctggcgaaacccagaccggtaagctattccgtatgcgcggtaaaggcgtcaagtctgtccgcggtggcgcacagggtgatttgctgtgccgcgttgtcgtcgaaacaccggtaggcctgaacgaaaggcagaaacagctgctgcaagagctgcaagaaagcttcggtggcccaaccggcgagcacaacagcccgcgctcaaagagcttctttgatggtgtgaagaagttttttgacgacctgacccgctaacctccccaaaagcctgcccgtgggcaggcctgggtaaaaatagggtgcgttgaagatatgcgagcacctgtaaagtggcggggatcactcccataagcgctaacttaagggttgtggtattacgcctgatatgatttaacgtgccgatgaattactctcacgataactggtcagcaattctggcccatattggtaagcccgaagaactggatacttcggcacgtaatgccggggctctaacccgccgccgcgaaattcgtgatgctgcaactctgctacgtctggggctggcttacggccccggggggatgtcattacgtgaagtcactgcatgggctcagctccatgacgttgcaacattatctgacgtggctctcctgaagcggctgcggaatgccgccgactggtttggcatacttgccgcacaaacacttgctgtacgcgccgcagttacgggttgtacaagcggaaagagattgcgtcttgtcgatggaacagcaatcagtgcgcccgggggcggcagcgctgaatggcgactacatatgggatatgatcctcatacctgtcagttcactgattttgagctaaccgacagcagagacgctgaacggctggaccgatttgcgcaaacggcagacgagatacgcattgctgaccggggattcggttcgcgtcccgaatgtatccgctcacttgcttttggagaagctgattatatcgtccgggttcactggcgaggattgcgctggttaactgcagaaggaatgcgctttgacatgatgggttttctgcgcgggctggattgcggtaagaacggtgaaaccactgtaatgataggcaattcaggtaataaaaaagccggagctccctttccggcacgtctcattgccgtatcacttcctcccgaaaaagcattaatcagtaaaacccgactgctcagcgagaatcgtcgaaaaggacgagtagttcaggcggaaacgctggaagcagcgggccatgtgctattgctaacatcattaccggaagatgaatattcagcagagcaagtggctgattgttaccgtctgcgatggcaaattgaactggcttttaagcggctcaaaagtttgctgcacctggatgctttgcgtgcaaaggaacctgaactcgcgaaagcgtggatatttgctaatctactcgccgcatttttaattgacgacataatccagccatcgctggatttcccccccagaagtgccggatccgaaaagaagaactaactcgttgtggagaataacaaaaatggtcatctggagcttacaggtggccattcgtgggacagtatccctgacagcctacaaaacgcaattgaagaacgcgaggcatcgtcttaacgaggcaccgaggcgtcgcattcttcagatggttcaacccttaagttagcgcttatgggatcactccccgccgttgctcttactcggattcgtaagccgtgaaaacagcaacctccgtctggccagttcggatgtgaacctcacagaggtcttttctcgttaccagcgccgccactacggcggtgatacagatgacgatcagggcgacaatcatcgccttatgctgcttcattgctctcttctccttgaccttacggtcagtaagaggcactctacatgtgttcagcatataggaggcctcgggttgatggtaaaatatcactcggggcttttctctatctgccgttcagctaatgcctgagacagacagcctcaagcacccgccgctattatatcgctctctttaacccattttgttttatcgattctaatcctgaagacgcctcgcatttttgtggcgtaattttttaatgatttaattatttaactttaatttatctcttcatcgcaattattgacgacaagctggattatttttgaaatattggcctaacaagcatcgccgactgacaacaaattaattattacttttcctaattaatccctcaggaatcctcaccttaagctatgattatctaggcttagggtcactcgtgagcgcttacagccgtcaaaaacgcatctcaccgctgatggcgcaaattcttcaatagctcgtaaaaaacgaattattcctacactataatctgattttaacgatgattcgtgcggggtaaaatagtaaaaacgatctattcacctgaaagagaaataaaaagtgaaacatctgcatcgattctttagcagtgatgcctcgggaggcattattcttatcattgccgctatcctggcgatgattatggccaacagcggcgcaaccagtggatggtatcacgactttctggagacgccggttcagctccgggttggttcactcgaaatcaacaaaaacatgctgttatggataaatgacgcgctgatggcggtatttttcctgttagtcggtctggaagttaaacgtgaactgatgcaaggatcgctagccagcttacgccaggccgcatttccagttatcgccgctattggtgggatgattgtgccggcattactctatctggcttttaactatgccgatccgattacccgcgaagggtgggcgatcccggcggctactgacattgcttttgcacttggtgtactggcgctgttgggaagtcgtgttccgttagcgctgaagatctttttgatggctctggctattatcgacgatcttggggccatcattatcatcgcattgttctacactaatgacttatcgatggcctctcttggcgtcgcggctgtagcaattgcggtactcgcggtattgaatctgtgtggtgcacgccgcacgggcgtctatattcttgttggcgtggtgttgtggactgcggtgttgaaatcgggggttcacgcaactctggcgggggtaattgtcggcttctttattcctttgaaagagaagcatgggcgttctccagcgaagcgactggagcatgtgttgcacccgtgggtggcgtatctgattttgccgctgtttgcatttgctaatgctggcgtttcactgcaaggcgtcacgctggatggcttgacctccattctgccattggggatcatcgctggcttgctgattggcaaaccgctggggattagtctgttctgctggttggcgctgcgtttgaaactggcgcatctgcctgagggaacgacttatcagcaaattatggtggtggggatcctgtgcggtatcggttttactatgtctatctttattgccagcctggcctttggtagcgtagatccagaactgattaactgggcgaaactcggtatcctggtcggttctatctcttcggcggtaattggatacagctggttacgcgttcgtttgcgtccatcagtttgacaggacggtttaccggggagccataaacggctcccttttcattgttatcagggagagaaatgagcatgtctcatatcaattacaaccacttgtattacttctggcatgtctataaagaaggttccgtggttggcgcagcggaggcgctttatttaactccacaaaccattaccggacagattcgagcgctggaagagcgcctgcaaggcaaattatttaaacgcaagggacgtggtctcgaacccagcgagctgggagaactggtctatcgctatgccgataaaatgttcaccttaagccaggaaatgctggatattgtgaactatcgcaaagaatccaatttattgtttgacgttggcgtggctgatgcactttccaaacgcctggtcagtagcgtacttaacgccgcagtggtagaaggcgagcccattcatcttcgctgcttcgaatccacccacgaaatgctgctggagcaattaagtcagcataaactggatatgatcatttctgactgtccgatagactctacgcagcaggaaggcctgttctccgtgagaattggcgaatgtggcgtgagtttctggtgtacaaatccaccaccagaaaaaccgttcccggcttgtctggaagaacggcgacttttgattcctgggcgacgttcaatgttagggcgcaaattgcttaactggtttaactcccagggattaaacgtagaaatcctcggcgagtttgatgatgccgctttgatgaaagcttttggtgcgatgcacaatgcaatcttcgttgccccaacgctttatgcatatgacttttatgccgataaaactgtcgtagaaattggtcgcgtcgagaatgtgatggaagagtaccatgctatttttgctgagcggatgattcagcacccggcggtacagcgaatctgcaatacggattattctgcgctttttagtccagcggtgcgttaatcggcagctcccccaaagttaaggtgggggagatagattagttgtacattaccacgattttgactcggctcattatttgcccgcttgagacattgtttccatatgtacgcgggcgaataaatagaggaatctgattacttccttcatggggatgctgaaaagagtagtaattgctggtaatgactccaacttattgatagtgttttatgttcagataatgcccgatgactttgtcatgcagctccaccgattttgagaacgacagcgacttccgtcccagccgtgccaggtgctgcctcagattcaggttatgccgctcaattcgctgcgtatatcgcttgctgattacgtgcagctttcccttcaggcgggattcatacagcggccagccatccgtcatccatatcaccacgtcaaagggtgacagcaggctcataagacgccccagcgtcgccatagtgcgttcaccgaatacgtgcgcaacaaccgtcttccggagactgtcatacgcgtaaaacagccagcgctggcgcgatttagccccgacatagccccactgttcgtccatttccgcgcagacgatgacgtcactgcccggctgtatgcgcgaggttaccgactgcggcctgagttttttaagtgacgtaaaatcgtgttgaggccaacgcccataatgcgggctgttgcccggcatccaacgccattcatggccatatcaatgattttctggtgcgtaccgggttgagaagcggtgtaagtgaactgcagttgccatgttttacggcagtgagagcagagatagcgctgatgtccggcggtgcttttgccgttacgcaccaccccgtcagtagctgaacaggagggacagctgatagaaacagaagccactggagcacctcaaaaacaccatcatacactaaatcagtaagttggcagcatcacctacctcaatgtgtatcacaatatccatattctttgtgggggagtctggagattgagtagatattcttgttcagaatgtatcagccgatggttctacgattcttaagccacgaagagttcagatagtacaacggcatgtctcttttgactatctggcaaccggcagtgtgttctctcacgcatcacaaaagcagcaggcataaaaaaacccgcttgcgcgggctttttcacaaagcttcagcaaattggcgattaagccagtttgttgatctgtgcagtcaggttagccttatgacgtgcagctttgtttttgtggatcagacctttagcagcctgacggtccacgatcggttgcatttcgttaaatgctttctgtgcagcagctttgtcgccagcttcgatagctgcgtatactttcttgatgaaagtacgcatcatagagcgacggcttgcgttgtgcttacgagccttttcagactgaatggcgcgcttcttagctgatttgatattagccaaggtccaactcccaaatgtgttctatatggacaattcaaaggccgaggaatatgcccttttagccttcttttgtcaatggatttgtgcaaataagcgccgttaatgtgccggcactcgttacgtagtgatggcgcaggattctaccagcttgcggggtgtgaatacagcttttccgcgataaaaattgcagcaggcggtcagtttcttcccgtgatttgcgccatggcaatgaaaagccacttctttctgatttcggtactcaatcgccggttaaccttgaccgctgtacaaggtatactcggacgattttcactgttttgagccagacatgaagctgatacgcggcatacataatctcagccaggccccgcaagaagggtgtgtgctgactattggtaatttcgacggcgtgcatcgcggtcatcgcgcgctgttacagggcttgcaggaagaagggcgcaagcgcaacttaccggtgatggtgatgctttttgaacctcaaccactggaactgtttgctaccgataaagccccggcaagactgacccggctgcgggaaaaactgcgttaccttgcagagtgtggcgttgattacgtgctgtgcgtgcgtttcgacaggcgtttcgcggcgttaaccgcgcaaaatttcatcagcgatcttctggtgaagcatttgcgcgtaaaatttcttgccgtaggtgatgatttccgctttggcgctggtcgtgaaggcgatttcttgttattacagaaagctggcatggaatacggcttcgatatcaccagtacgcaaactttttgcgaaggtggcgtgcgcatcagcagcaccgccgtgcgtcaggcccttgcggatgacaatctggctctggcagagagtttactggggcacccgtttgccatctccgggcgtgtagtccacggtgatgaattagggcgcactataggtttcccgacggcgaatgtaccgctgcgccgtcaggtttccccggtgaaaggggtttatgcggtagaagtgctgggcctcggtgaaaagccgttacccggcgtggcaaacatcggaacacgcccaacggttgccggtattcgccagcagctggaagtgcatttgttagatgttgcaatggacctttacggtcgccatatacaagtagtgctgcgtaaaaaaatacgcaatgagcagcgatttgcgtcgctggacgaactgaaagcgcagattgcgcgtgatgaattaaccgcccgcgaattttttgggctaacaaaaccggcttaagcctgttatgtaatcaaaccgaaatacggaaccgagaatctgatgagtgactataaatcaaccctgaatttgccggaaacagggttcccgatgcgtggcgatctcgccaagcgcgaacccggaatgctggcgcgttggactgatgatgatctgtacggcatcatccgtgcggctaaaaaaggcaaaaaaaccttcattctgcatgatggccctccttatgcgaatggcagcattcatattggtcactcggttaacaagattctgaaagacattatcgtgaagtccaaagggctttccggttatgactcgccgtatgtgcctggctgggactgccacggtctgccgatcgagctgaaagtcgagcaagaatacggtaagccgggtgagaaattcaccgccgccgagttccgcgccaagtgccgcgaatacgcggcgacccaggttgacggtcaacgcaaagactttatccgtctgggcgtgctgggcgactggtcgcacccgtacctgaccatggacttcaaaactgaagccaacatcatccgcgcgctgggcaaaatcatcggcaacggtcacctgcacaaaggcgcgaagccagttcactggtgcgttgactgccgttctgcgctggcggaagcggaagttgagtattacgacaaaacttctccgtccatcgacgttgctttccaggcagtcgatcaggatgcactgaaagcaaaatttgccgtaagcaacgttaacggcccaatctcgctggtaatctggaccaccacgccgtggactctgcctgccaaccgcgcaatctctattgcaccagatttcgactatgcgctggtgcagatcgacggtcaggccgtgattctggcgaaagatctggttgaaagcgtaatgcagcgtatcggcgtgaccgattacaccattctcggcacggtaaaaggtgcggagcttgagctgctgcgctttacccatccgtttatgggcttcgacgttccggcaatcctcggcgatcacgttaccctggatgccggtaccggtgccgttcacaccgcgcctggccacggcccggacgactatgtgatcggtcagaaatacggcctggaaaccgctaacccggttggcccggacggcacttatctgccgggcacttatccgacgctggatggcgtgaacgtcttcaaagcgaacgacatcgtcgttgcgctgctgcaggaaaaaggcgcgctgctgcacgttgagaaaatgcagcacagctatccgtgctgctggcgtcacaaaacgccgatcatcttccgcgcgacgccgcagtggttcgtcagcatggatcagaaaggtctgcgtgcgcagtcactgaaagagatcaaaggcgtgcagtggatcccggactggggccaggcgcgtatcgagtcgatggttgctaaccgtcctgactggtgtatctcccgtcagcgcacctggggtgtaccgatgtcactgttcgtgcacaaagacacggaagagctgcatccgcgtacccttgaactgatggaagaagtggcaaaacgcgttgaagtcgatggcatccaggcgtggtgggatctcgatgcgaaagagatcctcggcgacgaagctgatcagtacgtgaaagtgccggacacattggatgtatggtttgactccggatctacccactcttctgttgttgacgtgcgtccggaatttgccggtcacgcagcggacatgtatctggaaggttctgaccaacaccgcggctggttcatgtcttccctaatgatctccaccgcgatgaagggtaaagcgccgtatcgtcaggtactgacccacggctttaccgtggatggtcagggccgcaagatgtctaaatccatcggcaataccgtttcgccgcaggatgtgatgaacaaactgggcgcggatattctgcgtctgtgggtggcatcaaccgactacaccggtgaaatggccgtttctgacgagatcctgaaacgtgctgccgatagctatcgtcgtatccgtaacaccgcgcgcttcctgctggcaaacctgaacggttttgatccagcaaaagatatggtgaaaccggaagagatggtggtactggatcgctgggccgtaggttgtgcgaaagcggcacaggaagacatcctcaaggcgtacgaagcatacgatttccacgaagtggtacagcgtctgatgcgcttctgctccgttgagatgggttccttctacctcgacatcatcaaagaccgtcagtacaccgccaaagcggacagtgtggcgcgtcgtagctgccagactgcgctatatcacatcgcagaagcgctggtgcgctggatggcaccaatcctctccttcaccgctgatgaagtgtggggctacctgccgggcgaacgtgaaaaatacgtcttcaccggtgagtggtacgaaggcctgtttggcctggcagacagtgaagcgatgaacgatgcgttctgggacgagctgttgaaagtgcgtggcgaagtgaacaaagtcattgagcaagcgcgtgccgacaagaaagtgggtggctcgctggaagcggcagtaaccttgtatgcagaaccggaactgtcggcgaaactgaccgcgctgggcgatgaattacgatttgtcctgttgacctccggcgctaccgttgcagactataacgacgcacctgctgatgctcagcagagcgaagtactcaaagggctgaaagtcgcgttgagtaaagccgaaggtgagaagtgcccacgctgctggcactacacccaggatgtcggcaaggtggcggaacacgcagaaatctgcggccgctgtgtcagcaacgtcgccggtgacggtgaaaaacgtaagtttgcctgatgagtcaatcgatctgttcaacagggctacgctggctgtggctggtggtagtcgtgctgattatcgatctgggcagcaaatacctgatcctccagaactttgctctgggggatacggtcccgctgttcccgtcgcttaatctgcattatgcgcgtaactatggcgcggcgtttagtttccttgccgatagcggcggctggcagcgttggttctttgccggtattgcgattggtattagcgtgatcctggcagtgatgatgtatcgctcgaaggccacgcagaagctaaacaatatcgcttacgcgctgattattggcggcgcgctgggcaacctgttcgaccgcctgtggcacggcttcgttgtcgatatgatcgacttctacgtcggcgactggcacttcgccaccttcaaccttgccgatactgccatctgtgtcggtgcggcactgattgtgctggaaggttttttgccttctagagcgaaaaaacaataataaaccctgccggatgcgatgctgacgcatcttatccggcctacagattgctgcgaaatcgtaggccggataaggcgtttacgccgcatccggcaaaaatccttaaatataagagcaaacctgcatgtctgaatctgtacagagcaatagcgccgtcctggtgcacttcacgctaaaactcgacgatggcaccaccgccgagtctacccgcaacaacggtaaaccggcgctgttccgcctgggtgatgcttctctttctgaagggctggagcaacacctgttggggctgaaagtgggcgataaaaccaccttctcgttggagccagatgcggcgtttggcgtgccgtcaccggacctgattcagtacttctcccgccgtgaatttatggatgcaggcgagccagaaattggcgcaatcatgctttttaccgcaatggatggcagtgagatgcctggcgtgatccgcgaaattaacggcgactccattaccgttgatttcaaccatccgctggccgggcagaccgttcattttgatattgaagtgctggaaatcgatccggcactggaggcgtaacatgcagatcctgttggccaacccgcgtggtttttgtgccggggtagaccgcgctatcagcattgttgaaaacgcgctggccatttacggcgcaccgatatatgtccgtcacgaagtggtacataaccgctatgtggtcgatagcttgcgtgagcgtggggctatctttattgagcagattagcgaagtaccggacggcgcgatcctgattttctccgcacacggtgtttctcaggcggtacgtaacgaagcaaaaagtcgcgatttgacggtgtttgatgccacctgtccgctggtgaccaaagtgcatatggaagtcgcccgcgccagtcgccgtggcgaagaatctattctcatcggtcacgccgggcacccggaagtggaagggacaatgggccagtacagtaacccggaagggggaatgtatctggtcgaatcgccggacgatgtgtggaaactgacggtcaaaaacgaagagaagctctcctttatgacccagaccacgctgtcggtggatgacacgtctgatgtgatcgacgcgctgcgtaaacgcttcccgaaaattgtcggtccgcgcaaagatgacatctgctacgccacgactaaccgtcaggaagcggtacgcgccctggcagaacaggcggaagttgtgttggtggtcggttcgaaaaactcctccaactccaaccgtctggcggagctggcccagcgtatgggcaaacgcgcgtttttgattgacgatgcgaaagacatccaggaagagtgggtgaaagaggttaaatgcgtcggcgtgactgcgggcgcatcggctccggatattctggtgcagaatgtggtggcacgtttgcagcagctgggcggtggtgaagccattccgctggaaggccgtgaagaaaacattgttttcgaagtgccgaaagagctgcgtgtcgatattcgtgaagtcgattaagtcattagcagcctaagttatgcgaaaatgccggtcttgttaccggcattttttatggagaaaacatgcgtttacctatcttcctcgatactgaccccggcattgacgatgccgtcgccattgccgccgcgatttttgcacccgaactcgacctgcaactgatgaccaccgtcgcgggtaatgtctcggttgagaaaactacccgcaatgccctgcaactgctgcatttctggaatgcggagattccgctcgcccaaggggccgctgtgccactggtacgcgcaccgcgtgatgcggcatctgtgcacggcgaatcgggaatggctggctacgactttgttgagcacaaccgaaagccgctcgggataccggcgtttctggcgattcgggatgccctgatgcgtgcaccagagcctgttaccctggtggccatcggcccgttaaccaatattgcgctgttactttcacaatgcccggaatgcaagccgtatattcgccgtctggtgatcatgggtggttctgccggacgcggcaactgtacgccaaacgccgagtttaatattgctgccgatccagaagctgctgcctgtgtcttccgcagtggtattgaaatcgtcatgtgcggtttggatgtcaccaatcaggcaatattaactcctgactatctctctacactgccgcagttaaaccgtaccgggaaaatgcttcacgccctgtttagccactaccgtagcggcagtatgcaaagcggcttgcgaatgcacgatctctgcgccatcgcctggctggtgcgcccggacctgttcactctcaaaccctgttttgtggcagtggaaactcagggcgaatttacctcaggcacgacggtggttgatatcgacggttgcctgggcaagccagccaatgtacaggtggcattggatctggatgtgaaaggcttccagcagtgggtggctgaggtgctggctctggcgtcgtaacctgtcacatgttattggcatgcagtcattcatcgactcatgcctttcactgatatccctccctgtttatcattaatttctaattatcagcgtttttggctggcggcgtagcgatgcgctggttactctgaaaacggtctatgcaaattaacaaaagagaatagctatgcatgatgcaaacatccgcgttgccatcgcgggagccggggggcgtatgggccgccagttgattcaggcggcgctggcattagagggcgtgcagttgggcgctgcgctggagcgtgaaggatcttctttactgggcagcgacgccggtgagctggccggagccgggaaaacaggcgttaccgtgcaaagcagcctcgatgcggtaaaagatgattttgatgtgtttatcgattttacccgtccggaaggtacgctgaaccatctcgctttttgtcgccagcatggcaaagggatggtgatcggcactacggggtttgacgaagccggtaaacaagcaattcgtgacgccgctgccgatattgcgattgtctttgctgccaattttagcgttggcgttaacgtcatgcttaagctgctggagaaagcagccaaagtgatgggtgactacaccgatatcgaaattattgaagcacatcatagacataaagttgatgcgccgtcaggcaccgcactggcaatgggagaggcgatcgcccacgcccttgataaagatctgaaagattgcgcggtctacagtcgtgaaggccacaccggtgaacgtgtgcctggcaccattggttttgccaccgtgcgtgcaggtgacatcgttggtgaacataccgcgatgtttgccgatattggcgagcgtctggagatcacccataaggcgtccagccgtatgacatttgctaacggcgcggtaagatcggctttgtggttgagtggtaaggaaagcggtctttttgatatgcgagatgtacttgatctcaataatttgtaaccacaaaatatttgttatggtgcaaaaataacacatttaatttattgattataaagggctttaatttttggcccttttatttttggtgttatgtttttaaattgtctataagtgccaaaaattacatgttttgtcttctgtttttgttgttttaatgtaaattttgaccatttggtccacttttttctgctcgtttttatttcatgcaatcttcttgctgcgcaagcgttttccagaacaggttagatgatctttttgtcgcttaatgcctgtaaaacatgcatgagccacaaaataatataaaaaatcccgccattaagttgacttttagcgcccatatctccagaatgccgccgtttgccagaaattcgtcggtaagcagatttgcattgatttacgtcatcattgtgaattaatatgcaaataaagtgagtgaatattctctggagggtgttttgattaagtcagcgctattggttctggaagacggaacccagtttcacggtcgggccataggggcaacaggttcggcggttggggaagtcgttttcaatacttcaatgaccggttatcaagaaatcctcactgatccttcctattctcgtcaaatcgttactcttacttatccccatattggcaatgtcggcaccaatgacgccgatgaagaatcttctcaggtacatgcacaaggtctggtgattcgcgacctgccgctgattgccagcaacttccgtaataccgaagacctctcttcttacctgaaacgccataacatcgtggcgattgccgatatcgatacccgtaagctgacgcgtttactgcgcgagaaaggcgcacagaatggctgcattatcgcgggcgataacccggatgcggcgctggcgttagaaaaagcccgcgcgttcccaggtctgaatggcatggatctggcaaaagaagtgaccaccgcagaagcctatagctggacacaagggagctggacgttgaccggtggcctgccagaagcgaaaaaagaagacgagctgccgttccacgtcgtggcttatgattttggtgccaagcgcaacatcctgcggatgctggtggatagaggctgtcgcctgaccatcgttccggcgcaaacttctgcggaagatgtgctgaaaatgaatccagacggcatcttcctctccaacggtcctggcgacccggccccgtgcgattacgccattaccgccatccagaaattcctcgaaaccgatattccggtattcggcatctgtctcggtcatcagctgctggcgctggcgagcggtgcgaagactgtcaaaatgaaatttggtcaccacggcggcaaccatccggttaaagatgtggagaaaaacgtggtaatgatcaccgcccagaaccacggttttgcggtggacgaagcaacattacctgcaaacctgcgtgtcacgcataaatccctgttcgacggtacgttacagggcattcatcgcaccgataaaccggcattcagcttccaggggcaccctgaagccagccctggtccacacgacgccgcgccgttgttcgaccactttatcgagttaattgagcagtaccgtaaaaccgctaagtaatcaggagtaaaagagccatgccaaaacgtacagatataaaaagtatcctgattctgggtgcgggcccgattgttatcggtcaggcgtgtgagtttgactactctggcgcgcaagcgtgtaaagccctgcgtgaagagggttaccgcgtcattctggtgaactccaacccggcgaccatcatgaccgacccggaaatggctgatgcaacctacatcgagccgattcactgggaagttgtacgcaagattattgaaaaagagcgcccggacgcggtgctgccaacgatgggcggtcagacggcgctgaactgcgcgctggagctggaacgtcagggcgtgttggaagagttcggtgtcaccatgattggtgccactgccgatgcgattgataaagcagaagaccgccgtcgtttcgacgtagcgatgaagaaaattggtctggaaaccgcgcgttccggtatcgcacacacgatggaagaagcgctggcggttgccgctgacgtgggcttcccgtgcattattcgcccatcctttaccatgggcggtagcggcggcggtatcgcttataaccgtgaagagtttgaagaaatttgcgcccgcggtctggatctctctccgaccaaagagttgctgattgatgagtcgctgatcggctggaaagagtacgagatggaagtggtgcgtgataaaaacgacaactgcatcatcgtctgctctatcgaaaacttcgatgcgatgggcatccacaccggtgactccatcactgtcgcgccagcccaaacgctgaccgacaaagaatatcaaatcatgcgtaacgcctcgatggcggtgctgcgtgaaatcggcgttgaaaccggtggttccaacgttcagtttgcggtgaacccgaaaaacggtcgtctgattgttatcgaaatgaacccacgcgtgtcccgttcttcggcgctggcgtcgaaagcgaccggtttcccgattgctaaagtggcggcgaaactggcggtgggttacaccctcgacgaactgatgaacgacatcactggcggacgtactccggcctccttcgagccgtccatcgactatgtggttactaaaattcctcgcttcaacttcgaaaaattcgccggtgctaacgaccgtctgaccactcagatgaaatcggttggcgaagtgatggcgattggtcgcacgcagcaggaatccctgcaaaaagcgctgcgcggcctggaagtcggtgcgactggattcgacccgaaagtgagcctggatgacccggaagcgttaaccaaaatccgtcgcgaactgaaagacgcaggcgcagatcgtatctggtacatcgccgatgcgttccgtgcgggcctgtctgtggacggcgtcttcaacctgaccaacattgaccgctggttcctggtacagattgaagagctggtgcgtctggaagagaaagtggcggaagtgggcatcactggcctgaacgctgacttcctgcgccagctgaaacgcaaaggctttgccgatgcgcgcttggcaaaactggcgggcgtacgcgaagcggaaatccgtaagctgcgtgaccagtatgacctgcacccggtttataagcgcgtggatacctgtgcggcagagttcgccaccgacaccgcttacatgtactccacttatgaagaagagtgcgaagcgaatccgtctaccgaccgtgaaaaaatcatggtgcttggcggcggcccgaaccgtatcggtcagggtatcgaattcgactactgttgcgtacacgcctcgctggcgctgcgcgaagacggttacgaaaccattatggttaactgtaacccggaaaccgtctccaccgactacgacacttccgaccgcctctacttcgagccggtaactctggaagatgtgctggaaatcgtgcgtatcgagaagccgaaaggcgttatcgtccagtacggcggtcagaccccgctgaaactggcgcgcgcgctggaagctgctggcgtaccggttatcggcaccagcccggatgctatcgaccgtgcagaagaccgtgaacgcttccagcatgcggttgagcgtctgaaactgaaacaaccggcgaacgccaccgttaccgctattgaaatggcggtagagaaggcgaaagagattggctacccgctggtggtacgtccgtcttacgttctcggcggtcgggcgatggaaatcgtctatgacgaagctgacctgcgtcgctacttccagacggcggtcagcgtgtctaacgatgcgccagtgttgctggaccacttcctcgatgacgcggtagaagttgacgtggatgccatctgcgacggcgaaatggtgctgattggcggcatcatggagcatattgagcaggcgggcgtgcactccggtgactccgcatgttctctgccagcctacaccttaagtcaggaaattcaggatgtgatgcgccagcaggtgcagaaactggccttcgaattgcaggtgcgcggcctgatgaacgtgcagtttgcggtgaaaaacaacgaagtctacctgattgaagttaacccgcgtgcggcgcgtaccgttccgttcgtctccaaagccaccggcgtaccgctggcaaaagtggcggcgcgcgtgatggctggcaaatcgctggctgagcagggcgtaaccaaagaagttatcccgccgtactactcggtgaaagaagtggtgctgccgttcaataaattcccgggcgttgacccgctgttagggccagaaatgcgctctaccggggaagtcatgggcgtgggccgcaccttcgctgaagcgtttgccaaagcgcagctgggcagcaactccaccatgaagaaacacggtcgtgcgctgctttccgtgcgcgaaggcgataaagaacgcgtggtggacctggcggcaaaactgctgaaacagggcttcgagctggatgcgacccacggcacggcgattgtgctgggcgaagcaggtatcaacccgcgtctggtaaacaaggtgcatgaaggccgtccgcacattcaggaccgtatcaagaatggcgaatatacctacatcatcaacaccacctcaggccgtcgtgcgattgaagactcccgcgtgattcgtcgcagtgcgctgcaatataaagtgcattacgacaccaccctgaacggcggctttgccaccgcgatggcgctgaatgccgatgcgactgaaaaagtaatttcggtgcaggaaatgcacgcacagatcaaataatagcgtgtcatggcagatatttttcatccgctaatttgatcgaataactaatacggttctctgatgaggaccgtttttttttgcccattaagtaaatcttttggggaatcgatatttttgatgacataagcaggatttagctcacacttatcgacggtgaagttgcatactatcgatatatccacaattttaatatggccttgtttaattgcttcaaaacgagtcatagccagacttttaatttgtgaaactggagttcgtatgtgtgaaggatatgttgaaaaaccactctacttgttaatcgccgaatggatgatggctgaaaatcggtgggtgatagcaagagagatctctattcatttcgatattgaacacagcaaggcggttaataccctgacttatattctgtcggaagtcacagaaataagctgcgaagttaagatgatccctaataagctggaagggcggggatgccagtgtcagcgactggttaaagtggtcgatatcgatgagcaaatttacgcgcgcctgcgcaataacagtcgggaaaaattagtcggtgtaagaaagacgccgcgtattcctgccgttccgctcacggaacttaaccgcgagcagaagtggcagatgatgttgtcaaagagtatgcgtcgttaattttatctcgttgataccgggcgtcctgcttgccagatgcgatgttgtagcatcttatccagcaaccaggtcgcatccggcaagatcaccgtttaggcgtcacatccgtcgtcccctgcaaacgggggcgattttcctccatttgcctcagtggctgcgtttcatgtaacgatacatgacagcgcccgacaagatcctgatactctttggtattcaaccgtttccagtgtaactcgtcgtcactaacattgcgtacagcgcgggctggcgtacccatcaacaactggcgtttctcgccgcgaaagcccgctttgacaaagctcatggcggcaacaatgctctcttcgccaatgaccgcgccatccataatcacgctgttcatcccgaccaatgcatcgcgaccaatcaaacaaccatgcaggatcgctccgtgcccgatatggccgttttccccaacgatagtgtcagtgtcgcagtagccatgcataatgcagccatcctgaatattggctcccgcttgcacgatcaaccgcccgtagtcaccacgcagtgaggcgagtgggccgatgtagacaccggctcccacaatcacatcgccaatcaagacggcactgggatggacaaacgccgtcgggtgaaccaccggaattaacccctcaaaggcgtaatagctcacggttgttaacgtcctttccacaccggatcgcgcttctcggcaaacgccagcggcccttcaatggcatcttccgaatgcagaaccgatggatagtgtttcaacacgccgctgcgaatatagcgatacgcttcttctaccggcatttcgctggtggtgcggtagatctctttcagcgccgcaatcgccagcggggcgctgttaaccagctgctgagccagttcgcgggcgttatccatcagttccgcctggctaaccacgcggttgactatcccccaacgcagcgcctcttctgcgcccattcgtctgccggtcatcaccatttcattgacgatggcaggcggcaggatcttcggcagacgcagcacaccgccgctgtcaggaacgatgcccagtttggcttccggcagggcgaagctggcgttatcggcacaaacaataaaatctgccgccagcgccagttcaaagccgccgccaaaggcatagccgttcacagctgcgataaccggtttgtcgagattgaaaatttcggttaatcccgcaaaaccacccggaccaaagtcagcatccggtgcttcgccttctgctgccgcttttaaatcccagcccgcggaaaagaacttctctccggcaccggtaataatggcgacacgtaattgcggatcgtcacggaaatttagaaatacttcgcccatttcaaagctggtttttgcatcaatagcattcgcttttggacgatcaagggtaatttccagaattgatccattgcgggtcagatgtaatgattcactcattccttttctccatttttgctttttcagggacgacaacatccctgcaaaaaatgcatattgttttagagtgtgattattagctggcagggtagttccctgctgtttcatttatttcagattctttctaattattttccccgagcaattacgtggcagatcttttctgatctccagataagagggcactttaaatttcgccatattttgttcgcagaagcggaaaaattcctcttcgctcaatgtttcaccttcattcagcaccacaaatgctttgatggcttcatcgcgaatcgaatctttaatacccacaaccacgatgtcctgaattttcgggtgcgcggcgataatattttccagctccacgcaggagacattctcgccgccacgtttaatcatattgcagcggcgatcgacgaaataaaaaaagtcctcttcgtcgcggtatccggtatcgccggtatgcagccagccatcggcttccagcactttcgcagtggcttgtgggttgagaaagtactctttgaagatggttttcccaggtatgcctttaatgcagatttcaccgatctcaccagccgggagcgggcgattgtgatcgtcgcggatctccgcttcgtagcaaaaccccacccgaccaatcgacggccagcgtcgtttatcgccaggacgatcgccgataatgcccacaatggtttccgtcatcccataagacgtcagcaagcgaacgccgaagcgttcacaaaacgcatctttttcctgctccgacaagttgagataaaacatcacttcccgcaggcggtgttgctgatcgttcgctgaaggcggctgtaccatcaacgtacggatcatcatcggaatacattcggtaacggtggcgcggtacttctgtacctgtccccagaaggcgcgggcgctgtatttctcgaccagcacaaaggtggccccggcagaaaacgccgccatcgccgcagtacactggcaatcgatatgaaacgcaggcattaccgtcaggtagacgtcatcgtcacgcagtgcacactgccaggcggagtaatatccagcgaagcgcaggttgtaatgggtaatcaccacacctttcggtcgggaggtggtgccggaggtgaagagaatttccgccgtatcgtcagtcgatagcggcggtgcatagcacaaggtggcaggttgttgatttttcagttgagtaaacgaactcacgccatcatcagcgggaagtgccacatctgtcaggcaaatgtgccgcaattgagtggcatcttcctgctgaatctgttgatacataggatagaattgcgcactggtcaccagcaggcacgcctggctattttgcaggatccacgcgctttcctcgcacaacaggcgggcgttaatcggcaccataatcgcgccaatttttgccagcccgaaccagcaaaagataaattccgggcagttgtcgagatgtagtgcaaccttgtcgcctttgcgaatccccagcgtataaaacaggtttgccgtgcggttaatctcctgatttaactcaagataactataccggttaacgactccgccgctggattcacaaatcagcgccgttttatgaccgtaaacgtccgcaagatcgtcccacatttgacgtagatgttgtccgccaatgatatccattgcacctctatccatttttgttcgtttgttattgggcgggcgctagtcaggcaagccgactgacgccacgcgtttagtcctcaactttggccagacctttgctgaccaactcctgaatgtcgttttcgctgtagccgatatttttcaaaatggcagccgtgtccatgccatgtgagggcattccgcgccagatttgtccggggttatttttgaatttcggcatgatgttcggccctttgcaggtgcgaccatccatcgtttgccactgagtgattgattcgcgagccacatactgtggattgctttccagttccggtacggtcagcactttggcgcaggcgatattcagttcagcaaagcgttcttttacttccgcgatggtatgtgtcgccagccaggcatcgagtttctcttcaaccagtgggccgtaagggcattcgatacggtggataagctgagtgccttccgggatttctggcgtgccaagcagatgtgcgaggccaatatctttaaagcactcttcaatttgggtaatgcccaccagttccatcacgatgtagccgtcggcacatttatacagaccgcaaccggcgtagtagggatctttacctttgctcatgcgcgggcacatttcgccgccgttgaagtaatccatcatgaagtactggcccatacgcagcatcacttcatacatggcgatgtcgatactttcgcctttaccggtttcacgcactttatgcagtgctgccagcgccgccgtggtggcggtcaggccagaaaagtaatcggcggtatacgggaaggcaggcattggctggtcaacatcaccgttctgaatcaggtaaccactaaaggcctgggcgatagtgttataggccggaagattggtgtactcctcggtgccgtactgaccaaaaccggacaggtgagcgataaccagtttcgggttgtgctgccacagtacttcatcggtaatgccacgacgggcaaaggccggacctttactggcttcgatgaagatatcggtggtttccattaatttcagaaacgcttcgcggccttcatctttgaaaatatttaacgacagcgcgtgcaaattgcggcgggagagttgcgggtagttcggttgaacgcgaatggtgtcggcccaggcgacgttctcgatccagataacttccgcgccccattctgcgaacatttgcccggcaaacggtccggcgatttcgataccggagaagacaacgcgcaatccggccaacggcccgaatttcggcatgggtagatgatccattatttgctcctgaaaaatttatgtagcgcatgactgccggatgcggcgtaaacgctttatccggcctacattcgtgctcccgtaggcctgataagacgcatcagcgtcgcatcaggcagcgcacggacttagcggtattgcttcagcaccgcacgacccagcgtcaggatctgcatttcgtcagatcccccggagacgcggtctacacgcagatcacgccagaagcggctgatgcggtggttgcccgcaatcccgacaccgcccagcacctgcattgcgctatccacaacttcaaatgccgcattggcgcagaagtatttgcacatcgctgcatcgccagaggtgatggtgccgttgtctgctttccacgctgcttcatacagcatgtttttcatggagtttaatttgatcgccatgtgggcgaatttttcctgaatcaactggaaacgaccaatagcctcgccaaactgcacgcgctgattggcgtagcgcgccgcatcttcaaaggcgcacatcgccgtaccgtagttggtgagggctaccaggaaacgttcatggtcgaactcttctttgacgcggttaaagccgttaccttcccgaccgaacatgtctttctcgtccagttccacgtcgtcaaaggtgatttcacagcagctatccatacgcagaccgagcttttcaagtttggtcactttgatgcccggtttgctcatatcaacaaaccattcggtgtagacaggtttgtccggagaagccccgtcgcgcgccatcaccacgatgtacggggtgtaggcgctgctggtaataaaacacttactaccattaagataaatcttaccatttctacgggtataagtcgttttcaggctacccacgtcggagcccgcgcccggttcggtaatcgctgagttccacatctgcttaccggtgccgcggaaagccataattttgtcgatctgctcttgtgtgccttcgcgcaggaaggtgttgaacccgcccggcaactggtacagcacataggttggtgcccccagacgtcccagctccatccacacggcggcgagagtaacaaaccccgcgtccagaccaccgtgctcttcagggatcagcagactgtcgatacccatatccgccagtgctttgacaaaacgttccgggtagacgctgtcacggtcgcactcggcaaaataggcctcccagttttcgctggccatcagttcgcggataccggcgacaaacagttcctgctcatcatttaaattaaaatccatctttcaacctcttgatattttgggggttaattaatctttccagttctgtttcgcgtctttaataaaggagagcgtcaccataatgttgacgaagaacagcgggcatcctccggcgataatggcggtttgaatcggtttcaggccgccgagcgccagcagaacaataccgataatgccaaccagaattgaccaaccgatacgcaccagcagaggtggttcttcaccatcgcgtacttcgcggcaagtggacatcgccagggtataagagcaggcgttaaccagcgtaacggtggcaataaagcagaggatgaagaagccccacatggtggcggtgctgagtggcagagcggcccaggtttcaatgatggcgcgcgccacaccgtactgttcgatcagatttggaatgttgatgatgtttttatctatcaacagcagagtgttactaccgagtacagtccacaggatccaggttgacgctgtcagccccagcaccatgccgaagcacagttcacgcacagtacgaccacgggagatgcgggcgaggaagatactcatctggatagcataaatcacccaccatgcccagtagaacacggtccagccctgcgggaagccgcctttagcgatgggatcggtatagaacaacatgcgcggcagatacatcagcaacatccccaccgaatcggtgaagtagttcatgatgaagctggcaccgctgacaatgaacacccaacccagcatcaggaagctcaggtaactacgcacgtcactggcgatacgtacccctttttgcagaccgcaagcgacgcaaatggcgttgaggataatccagcaggtaatgatgatagcgtccagttgcagggtatgcggaatgccaaacaaccattgcatacactcggtcaccagcggcgtggcaaggcccagactggtacccatcgcgaagatcaaggcgacgagatagaagttgtcgacgatagtgccgaacaaccctttggcgtgtttttcacctaccagcggcaccagtgtcgagctggggcgaatcacttccattttgcggacaaagaagaagtaagcgaaggcgactgaaaggaagctgtaagtggcccacggcagaggtccccagtggaacaagctgtaagccagccccaactctttcgcccctgtcgagttcggttctaagccaaacggcggggtggagatgtagtagtagatctcaatcgatccccagaacagtacggcagcagacgtacaggaggcgaacatcataaagatccaactggcggtgctaaattctggcggttcgttacctaaacgctttttggcatacgggccaaacaccagccagaaccaaccgaaaagcatcaccaccatataccattcaaatgcccatccccatacattggtgacgtaactgaatacagcattaataacgacattcgctgcatccagatctctgactgtaagccaacaaagtatgccgacgattattaacggcggaaagaaaaccttcggttctattcccgtttttctcttttcattcttcatgagttaattccactgtgaaaacgaatatttattttgcgttcccgtttgttttatttttgttaacatttaatataattattattaacctcgtggacgcgttaatggctaactcataatgggtattcaataagctgtattctgtgattggtatcacatttttgtttcgggtgaatagagggcgttttttcgttaattttgattaataatcagtttgttatgctctgttgtgagtaaaaaataacatctgactttcaatattggtgatccataaaacaatattgaaaatttctttttgctacgccgtgttttcaatattggtgaggaacttaacaatattgaaagttggatttatctgcgtgtgacattttcaatattggtgattaaagttttatttcaaaattaaagggcgtgatatctgtaattaacaccaccgatatgaacgacgtttccttcatgatttctggagatgcaatgaagattattacttgctataagtgcgtgcctgatgaacaggatattgcggtcaataatgctgatggttcattagacttcagcaaagccgatgccaaaataagccaatacgatctcaacgctattgaagcggcttgccagctaaagcaacaggcagcagaggcgcaggtgacagccttaagtgtgggcggtaaagccctgaccaacgccaaagggcgtaaagatgtgctatcgcgcggcccggatgaactgattgtggtgattgatgaccagttcgagcaggcactgccgcaacaaacggcgagcgcactggctgcagccgcccagaaagcaggctttgatctgatcctctgtggcgatggttcttccgacctttatgcccagcaggttggtctgctggtgggcgaaatcctcaatattccggcagttaacggcgtcagcaaaattatctccctgacggcagataccctcaccgttgagcgcgaactggaagatgaaaccgaaaccttaagcattccgctgcctgcggttgttgctgtttccactgatatcaactccccacaaattccttcgatgaaagccattctcggcgcggcgaaaaagcccgtccaggtatggtcggcggcggatattggttttaacgcagaggcagcctggtcagaacaacaggttgccgcgccgaaacagcgcgaacgtcagcgcatcgtgattgaaggcgacggcgaagaacagatcgccgcatttgctgaaaatcttcgcaaagtcatttaattacaggggatgctatgaacacgttttctcaagtctgggtattcagcgataccccttctcgtctgccggaactgatgaacggtgcgcaggctttagctaatcaaatcaacacctttgtcctcaatgatgccgacggcgcacaggcaatccagctcggcgctaatcatgtctggaaattaaacggcaaaccggacgatcggatgatcgaagattacgccggtgtcatggctgacactattcgccagcacggcgcagacggcctggtgctgctgccaaacacccgtcgcggcaaattactggcggcaaaactgggttatcgccttaaagcggcggtgtctaacgatgccagcaccgtcagcgtacaggacggtaaagcgacagtgaaacacatggtttacggtggtctggcgattggcgaagaacgcattgccacgccgtatgcggtactgaccatcagcagcggcacgttcgatgcggctcagccagacgcgtcacgcactggcgaaacgcacaccgtggagtggcaggctccggctgtggcgattacccgcacggcaacccaggcgcgccagagcaacagcgtcgatctcgacaaagcccgtctggtggtcagcgtcggtcgcggtattggcagcaaagagaacattgcgctggcagaacagctttgcaaggcgataggtgcggagttggcctgttctcgtccggtggcggaaaacgaaaaatggatggagcacgaacgctatgtcggtatctccaacctgatgctgaaacctgaactgtacctggcggtggggatctccgggcagatccagcacatggttggcgctaacgcgtcgcaaaccattttcgccatcaataaagataaaaatgcgccgatcttccagtacgcggattacggcattgttggcgacgccgtgaagatccttccggcgctgaccgcagctttagcgcgttgatccactctggcagggctgcattttggccctgccgctgacagggagctcttatgtccgaagatatctttgacgccatcatcgtcggtgcagggcttgccggttcggttgccgcactggtgctcgcccgcgaaggtgcgcaagtgttagttatcgagcgtggcaattccgcaggtgccaagaacgtcaccggcgggcgtctctatgcccacagtctggaacacattattcctggtttcgccgactccgcccccgtagaacgcctgatcacccatgaaaaactcgcgtttatgacggaaaagtcagcgatgactatggactactgcaatggtgacgaaacctcgccatcccagcgttcttactccgttttgcgcagtaaatttgatgcctggctgatggagcaggccgaagaagcgggcgcgcagttaattaccgggatccgcgtcgataacctcgtacagcgcgatggcaaagtcgtcggtgtagaagccgatggcgatgtgattgaagcgaaaacggtgatccttgctgatggggtgaactccatccttgccgaaaaattggggatggcaaaacgcgtcaaaccgacggatgtggcggttggcgtgaaggaactgatcgagttaccgaagtcggttattgaagaccgttttcagttgcagggtaatcagggggcggcttgcctgtttgcgggatcacccaccgatggcctgatgggcggcggcttcctttataccaatgaaaacaccctgtcgctggggctggtttgtggtttgcatcatctgcatgacgcgaaaaaatcggtgccgcaaatgctggaagatttcaaacagcatccggccgttgcaccgctgatcgcgggcggcaagctggtggaatattccgctcacgtagtgccggaagcaggcatcaacatgctgccggagttggttggtgacggcgtattgattgccggtgatgccgccggaatgtgtatgaacctcggttttaccattcgcggtatggatctggcgattgccgccggggaagccgcagcaaaaaccgtgctttcagcgatgaaaagcgacgatttcagtaagcaaaaactggcggaatatcgtcagcatcttgagagtggtccgctgcgcgatatgcgtatgtaccagaaactaccggcgttccttgataacccacgcatgtttagcggctacccggagctggcggtgggtgtggcgcgtgacctgttcaccattgatggcagcgcgccggaactgatgcgcaagaaaatcctccgccacggcaagaaagtgggcttcatcaatctaatcaaggatggcatgaaaggagtgaccgttttatgacttctcccgtcaatgtggacgtcaaactgggcgtcaataaattcaatgtcgatgaagagcatccgcacattgttgtgaaggccgatgctgataaacaggcgctggagctgctggtgaaagcgtgccccgcaggtctgtacaagaagcaggatgacggcagtgtgcgcttcgattacgccggatgtctggagtgcggcacctgtcgcattctggggctggggtcggcgctggaacagtgggaatacccgcgcggcacctttggtgtggagttccgttacggctgatgttggtttgatacgtaacgccgcactgactctcattgcaaaaaacaggaataaccatgcaaccgtccagaaactttgacgatctcaaattctcctctattcaccgccgcattttgctgtggggaagcggtggtccgtttctggatggttatgtactggtaatgattggcgtggcgctggagcaactgacgccggcgctgaaactggacgctgactggattggcttgctgggcgcgggaacgctcgccgggctgttcgttggcacatcgctgtttggttatatttccgataaagtcggacggcgcaaaatgttcctcattgatatcatcgccatcggcgtgatatcggtggcgacgatgtttgtttcatcccccgtcgaactgttggtgatgcgggtacttatcggcattgtcatcggtgcagattatcccatcgccacctcaatgatcaccgagttctccagtacccgtcagcgggcgttttccatcagctttattgccgcgatgtggtatgtcggcgcgacctgtgccgatctggtcggctactggctttatgatgtggaaggcggctggcgctggatgctgggtagcgcggcgatcccctgtttgttgattttgattggtcgattcgaactgcctgaatctccccgctggttattacgcaaagggcgagtaaaagagtgcgaagagatgatgatcaaactgtttggcgaaccggtggctttcgatgaagagcagccgcagcaaacccgttttcgcgatctgtttaatcgccgccattttccttttgttctgtttgttgccgccatctggacctgccaggtgatcccaatgttcgccatttacacctttggcccgcaaatcgttggtttgttgggattgggggttggcaaaaacgcggcactagggaatgtggtgattagcctgttctttatgctcggctgtattccgccgatgctgtggttaaacactgccggacggcgtccattgttgattggcagctttgccatgatgacgctggcgctggcggttttggggctaatcccggatatggggatctggctggtagtgatggcctttgcggtgtatgcctttttctctggcgggccgggtaatttgcagtggctctatcctaatgaactcttcccgacagatatccgcgcctctgccgtgggcgtgattatgtccttaagtcgtattggcaccattgtttcgacctgggcactaccgatctttatcaataattacggtatcagtaacacgatgctaatgggggcgggtatctcgctgtttggcttgttgatttccgtagcgtttgccccggagactcgagggatgtcactggcgcagaccagcaatatgacgatccgcgggcagagaatggggtaaattgttcagatttctctcttttctgaatcaatattattgactataagccgcgtgaatatatgactacactttgtgggaaaacaaaggcgtaatcacgcgggctacctatgattcttataatttatgcgcatccgtatccgcatcattcccatgcgaataaacggatgcttgaacaggcaaggacgctggaaggcgtcgaaattcgctctctttatcaactctatcctgacttcaatatcgatattgccgccgagcaggaggcgctgtctcgcgccgatctgatcgtctggcagcatccgatgcagtggtacagcattcctccgctcctcaaactttggatcgataaagttttctcccacggctgggcttacggtcatggcggcacggcgctgcatggcaaacatttgctgtgggcggtgacgaccggcggcggggaaagccattttgaaattggtgcgcatccgggctttgatgtgctgtcgcagccgctacaggcgacggcaatctactgcgggctgaactggctgccaccgtttgccatgcactgcacctttatttgtgacgacgaaaccctcgaagggcaggcgcgtcactataagcaacgtctgctggaatggcaggaggcccatcatggatagccatacgctgattcaggcgctgatttatctcggttcggcagcgctgattgtacccattgcggtacgtcttggtctgggatcggtacttggctacctgatcgccggctgcattattggcccgtgggggctgcgactggtgaccgatgccgaatctattctgcactttgccgagattggggtggtgctgatgctgtttattatcggcctcgaactcgatccacaaaggctgtggaagctgcgtgcggcagtgttcggctgtggcgcattgcagatggtgatttgcggcggcctgctggggctgttctgcatgttacttgggctgcgctggcaggtcgcggaattgatcggcatgacgctggcgctctcctctacggcgattgccatgcaggcgatgaatgaacgcaatctgatggtgacgcaaatgggtcgcagtgcctttgcggtgctgctgttccaggatatcgcggcgatcccgctggtggcgatgattccgctactggcaacgagcagtgcctcgacgacgatgggcgcatttgctctctcggcgttaaaagtggcgggtgcgctggtgctggtggtattgctggggcgctatgtcacgcgtccggcgctgcgttttgtagcccgctctggcttgcgggaagtgtttagtgccgtggcgttattcctcgtgtttggctttggtttgctgctggaagaggtcggcttgtcgatggcgatgggcgcgtttctggcgggcgtactgctggcaagctcggaataccgtcatgcgctggagagcgatatcgaaccatttaaaggtttgctgttggggctgtttttcatcggtgttggcatgtcgatagactttggcacgctgcttgaaaacccattgcgcattgtcattttgctgctcggtttcctcatcatcaaaatcgccatgctgtggctgattgcccgaccgttgcaagtgccaaataaacagcgtcgttggtttgcggtgttgttagggcagggcagtgagtttgcctttgtggtatttggcgcggcgcagatggcgaatgtgctggagccggagtgggcgaaatcgctgaccctggcggtggcgctgtcgatggcagcaacgccgattctgctggtgatcctcaatcgccttgagcaatcttctactgaggaagcgcgtgaagccgatgagatcgacgaagaacagccgcgcgtgattatcgccggattcggtcgttttgggcagattaccggacgtttactgctctccagcggggtgaaaatggtggtactcgatcacgatccggaccatatcgaaaccttgcgtaaatttggtatgaaagtgttttatggcgatgccacgcggatggatttactggaatctgccggagcggcgaaagcggaagtgctgattaacgccatcgacgatccgcaaaccaacctgcaactgacagagatggtgaaagaacatttcccgcatttgcagattattgcccgcgcccgcgatgtcgaccactacattcgtttgcgtcaggcaggcgttgaaaagccggagcgtgaaaccttcgaaggtgcgctgaaaaccgggcgtctggcactggaaagtttaggtctggggccgtatgaagcgcgagaacgtgccgatgtgttccgccgctttaatattcagatggtggaagagatggcaatggttgagaacgacaccaaagcccgcgcggcggtctataaacgcaccagcgcgatgttaagtgagatcattaccgaggaccgcgaacatctgtcattaattcaacgacatggctggcagggaaccgaagaaggtaaacataccggcaacatggcggatgaaccggaaacgaaaccctcatcctaataaagagtgacgtaaatcacactttacagctaactgtttgtttttgtttcattgtaatgcggcgagtccagggagagagcgtggactcgccagcagaatataaaattttcctcaacatcatcctcgcaccagtcgacgacggtttacgctttacgtatagtggcgacaattttttttatcgggaaatctcaatgatcagtctgattgcggcgttagcggtagatcgcgttatcggcatggaaaacgccatgccgtggaacctgcctgccgatctcgcctggtttaaacgcaacaccttaaataaacccgtgattatgggccgccatacctgggaatcaatcggtcgtccgttgccaggacgcaaaaatattatcctcagcagtcaaccgggtacggacgatcgcgtaacgtgggtgaagtcggtggatgaagccatcgcggcgtgtggtgacgtaccagaaatcatggtgattggcggcggtcgcgtttatgaacagttcttgccaaaagcgcaaaaactgtatctgacgcatatcgacgcagaagtggaaggcgacacccatttcccggattacgagccggatgactgggaatcggtattcagcgaattccacgatgctgatgcgcagaactctcacagctattgctttgagattctggagcggcggtaattttgtatagaatttacggctagcgccggatgcgacgccggtcgcgtcttatccggccttcctatatcaggctgtgtttaagacgccgccgcttcgcccaaatccttatgccggttcgacggctggacaaaatactgtttatcttcccagcgcaggcaggttaatgtaccaccccagcagcagccggtatccagcgcgtatataccttccggcgtacctttgccctccagcgatgcccagtgaccaaaggcgatgctgtattcttcagcgacagggccaggaatcgcaaaccacggtttcagtggggcaggggcctcttccggcgattctttgctgtacatatccagttgaccgttcgggaagcaaaaacgcatacgggtaaaagcgttggtgataaaacgcagtcttcccagcccccgcaattccggtgaccagttatttggcatatcgccgtacatggcatcaagaaagaagggataggagtcactcgatagcaccgcttctacatcgcgtgcgcactctttggcggtctgcagatcccactgcggcgtgatccctgcgtgggccatcaccagctttttctcttcgtcgatttgcagcagaggctggcgccgcagccagttaagcagctcgtcggcatccggcgcttccagcagcggtgtcaggcgatctttcggtttattgcggctgatcccggcaaataccgccagcagatgcagatcgtgattgcccagcaccagacgtacgctgtcgcctaaggatttcacatagcgcagaacatccagcgaacccggcccgcgcgcgaccagatcgcccgtcagccagagggtatctttcccaggggtaaattctactttatgcagcaatgcgatcagttcatcgtaacaaccatgaacgtcgccaataaggtatgtcgccatattcttttaatgaatgagtgtgggaacggcgagtcggaatacgggaatgtcgatgctgaaagggacgccattttcatcgatcatttcgtagtgaccctgcatggtgcccagcggggtttcaatgattgcaccgctggtgtactggtactcttcgccaggcgcgataagtggctggacgccaaccactccttcgccctggacttcggtttcacggccattgccattggtgatcagccagtaacgccccaacaactgcactggcgctcgccccagattgcgtatggttacggtataagcaaaaacgtaacgttcattatcaggtgaagattgagcctcaatgtagacgctttgaacctgaatacacactcggggcgaattgatcatcgttaactctcctgcaaaggcgcgttctccgccagatagttcgccatctggcaatattgcgcgacagagatattttccgctcgcatcgccgggtcgatccccattcccgttaacacctcgacgctaaacaggttgccgaggctgttacgaatggttttacgacgctggttaaaggcttcggtggtgatgcggctcaacacacgaacatctttaaccgggtgaggcatcgttgcatgaggaaccaggcgcacgacggcggaatccactttgggtggtggtgtaaaggctgacggcggtacttccagtaccgggatcacattgcaatagtattgcgccatgacgcttaatcgaccatacgctttgctgttcggtcctgcaaccagacgattcaccacctctttttgcaacataaagtgcatgtcggcaatggcatcagtatagctaaacagatggaacatcaacggcgtggagatgttataaggcaggttgccgaaaacacgcagcggctgacccattttctcggccagttcaccaaagttaaaggtcatcgcatcctgctgataaatcgtcagtttcgggcctaagaatggatgcgtttgcagacgtgccgccagatcgcggtcaagttcgatgaccgtcagctggtccagacgttcgccgaccggttcggtcaatgccgccagaccggggccgatttcgaccatcgcctggcccttttgcgggttaatggcagacacaatactgtcgatcacgaactgatcgttgagaaagttttgcccgaagcgtttacgggctaagtggccctggtggactcgattattcattgggtgttaacaatcattttgatggcgagattaagcgccgtaataaaactgccgacatcggctttgccacgtcccgccagttcaagcgcggtgccgtggtccactgatgtgcgaataaagggcaggcccagcgtaatgttcacaccgcgcccgaagccctggtattttagcacgggaagaccctgatcgtggtacatcgccagcacggcgtcggcgttatcaagatatttcggctgaaacagggtatcggcaggcagcggcccgttgagtttcatcccctgcgcccgcagctcattgagcaccggaataatggtgtctatctcttccgtacccatatgaccgccttcgcccgcgtgcggattcagcccgcagaccagaatgcgcggttcggcaataccaaatttggtccgcaaatcgtgatgcaaaatagcaatcacttcgtgcaaaagtgcaggggtgatagcgtctgcgatatcgcgcagcggtaaatgcgtcgttgccagcgccacgcgaagttcttcggtcgccagcatcatcaccacctttttcgcctgcgaacgctcttcgaaaaactcggtatgaccggtaaaaggaatgccagcgtcgttaataacgcctttatgcaccggacctgtgatcagcgcggcaaattcgccgttcagacaaccatcgcacgctcgcgccagcgtttccaccacataatgcccattttcaaccgctaactgccccgcagtgacaggtgcacgtagcgcgacaggaagtagcgttaatgtgcccgcagtttgcggttgtgcaggggagttgggggaataagggcggagggtgagcggcaaaccgagcatcgctgcccggttggtaaggagagtggcatcggcacaaacaaccagttcgaccggccactcacgctgtgcaagctggacaactaagtccgggccaatcccggcgggctcgccgggagtgatcacaacacgttgggttttaaccattagttgctcaggattttaacgtaggcgctggcacgttgttcctgcatccagcttgctgcttcttccgagaacttacggttcatcagcatgcggtatgcacgatctttctgcgcagcgtcggttttatcgacattacgggtatccagcagttcgattaaatgccagccgaatgaagagtgaaccggtgcactcatttgacctttgttcaggcgagtcagggcgtcacggaaggccggatcgaaaatatctggtgtagcccagccgagatcgccgccctggttagcagagcctggatcctgagagaactctttcgctgcggcagcaaaagtcgttttaccactcttgatatcagcagcaatctgttccagtttcacacgggcctgttcgtcagtcatgatcggcgacggtttcagcagaatatggcgagcatgaacttcggtcaccgagatatttttgctttcgccgcgcaggtcgttaactttcagaatatggaagccaacgccggaacgaatcgggccaacaatgtcgcctttcttcgcggtgcttaatgcctgggcgaagatcccgggcaactcctgaatacggccccagcccatctggccgccgttcagcgcctgctggtcggcagaatgagcaatcgccagcttaccgaaatcagcgccgttacgcgcctgatcgacaatggcgcgcgcctggctttccgcttcgttcacctgatcagaggtcgggttttccggcagcgggatcaggatgtggctcaggttcagctcagtgctggcgtcgttttggttacccacctgctgcgccagggattcgacttcctgcggcaggatggtgatgcgacgacgcacctcgttgttacgcacttcagagataatcatctctttgcggatctggttacgataggtgttgtagttcagtccatcgtaagccagacggctgcgcatctgatccagcgtcatgttgttctgtttcgcgatgttagcaatcgcctgatccagctgctcatcggagattttcactcccattttctgccccatctgcaggatgatttgatccatgatcaaacgttccatgatttggtggcgcagcgtcgcgtcatcaggaagttgctgccttgcctgagcagcgttcagttttaccgactgcattaatccatcaacgtcgctttccagcacgacgccgttattgacgacggctgcgactttatcgactacctggggggcagcgaaactggtattcgcgatcatggcgataccgagaagcagcgttttccagttcttcatactttttccatttcaattaaccgcactgcggattacgtggtaaatcaacaaatcacaaagtgttttgatacggcagaatgttcgaacgcagcatctcttgcgtacccagaccgtagttggagctcaggccgcgaagttcgatgttaaagccgattgcgttgtcatataccgcatgttgtttatcgttatcccaaccgttcagcttccgctcgtaaccgacgcgaattgcatagcagcaggagctgtattgcacacctaacatagagtcggcttgcttgttagcattggtgtcgtagtagtaggccccaacaatggaccaacgatcggcaattggccagctggcgacagcacctacctgcgaaataccattcttatattgctcagcagtggaatagtacttaggcagcgtagcctgaatatattccgggctggcgtaacggtaattcagctgtaccagacggtcttcatcccgacggtattcaatgctggagttactggtcgctacgttatccagacgtgtatcgtactgaatcccgccacgcaatccccaacgctcggagatacgccagtaagtatcgcctgcccacaccagtgaacccgttttgtcgtcattctcccatgttatgttgtcatcgccagtgcgagactccgtgaaatagtagatttgaccaacggaaatattaaaacgttcaacggcagcatcatcatatatgcgagatgtgacaccggtcgtcacctggttagcggaggcaatacggtcaagaccgccgtaagtccggtcccggaacaggccagagtagtcagattgcagcagagacgagtcgtagttatagatgtcgctctgatcgcgatacggcacgtacaaatactgcgcgcgcggttccagcgtttgggtataacccggagccagcatttccatatcgcgttcaaagaccattttgccgtcaactttgaattgcggcattacgcggttaacggattcgtccagcttggtcgtgtttctggagttataccagtcaagattggtttgctgataatgggttgccagcaacttcgcttcggtattgatgctgccccagttattagagagcggcaaattgatggtcggttccaggtgaacacgggttgcttcaggcatgtcgtctctggtgttaacaaagtgcactgcctggccgtaaatacgcgtatcaaacggaccaacatcattctggtagtaattaacgtctaactgcggctctgccgagtagctactggtgttctgttcgctgaaaacctggaactgcttggttgaaacggtggcattgaagttttgcaccgcatagccaacgctgaatttttgcgttgcgtagccgtcagtactggaaccgtacttgttatcgaaatcattgaagtagctaggatcgctgaccttggtgtagtcgacgttgaaacgccacacctgatccatgaccccggagtggttccagtagaataaccaacgacgtgaactgtcatcgttcgggtgttcatcttcatagactttatctgaaggcagatagtccagttccatcaagccagcgcccgcctgggagaggtagcggaattcgttctcccacatgatgttgccacgacgatgcatataatgcggcgtgatggtggcatccatatttggcgcgatgttccagtaatatggcaggtagaactcaaagtagttggtggtggtgtacttggcgttcgggatcaagaaaccagagcgacgtttgtcacccaccggcaactgcaaataggggctataaaagatcggtaccggacccaccttaaagcgggcgttccagatctccgcaacttgttcttcgcggtcatgaataatttcgctacctaccacgctccaggtgtcagaacccggcagacaggaggtaaagctaccgttatccagaatggtatagcggttttcgccacgttgtttcatcaggtccgctttaccgcgaccctggcgacccaccatctggtaatcaccttcccagacgttggtatctttggtgttcagattcgcccagcctttcggccctttgaggatcacctggttatcgtcgtaatggacattaccgagcgcatcaacggtacgtaccggctccggttgtcctggtgcctctttttgatggagctgcacttcgtcggcctgcagacggctgttaccctgcatgatatccacgctgccagtaaacacggcgtcatccgggtagtcccctttcgcgtggtcagcattgatagtcacgggtaagtcattggtatcgccctgtaccagaggacggtcatagcttggcacgcccaacatgcactgtgaggcgaggtcggctgccagtccctgttgactataaagggcggtggcaatcatggtggccaggagagtggggatacgttttttcatacgttgattttattgttccatcatcggtaacgttgcgcgtgacaaacggtcagagactaacgtactcgtcatctctacgctagtgttaatcctgtccgaatagcgtcagtggtgttaggcacggcattgaatgacaggtatgataatgcaaattataggcgatgtcccacaattgaccgcagccggaaaacggtaaaagcacctttatattgtgggagatagccctgatatccgtgtgtcgatttggggaatatatgcagtattggggaaaaatcattggcgtggccgtggccttactgatgggcggcggcttttggggcgtagtgttaggcctgttaattggccatatgtttgataaagcccgtagccgtaaaatggcgtggttcgccaaccagcgtgagcgtcaggcgctgttttttgccaccacttttgaagtgatggggcatttaaccaaatccaaaggtcgcgtcacggaggctgatattcatatcgccagccagttgatggaccgaatgaatcttcatggcgcttcccgtactgcggcgcaaaatgcgttccgggtgggaaaatcagacaattacccgctgcgcgaaaagatgcgccagtttcgcagtgtctgctttggtcgttttgacttaattcgtatgtttctggagatccagattcaggcggcgtttgctgatggttcactgcacccgaatgaacgggcggtgctgtatgtcattgcagaagaattagggatctcccgcgctcagtttgaccagtttttgcgcatgatgcagggcggtgcacagtttggcggcggttatcagcagcaaactggcggtggtaactggcagcaagcgcagcgtggcccaacgctggaagatgcctgtaatgtgctgggcgtgaagccgacggatgatgcgaccaccatcaaacgtgcctaccgtaagctgatgagtgaacaccatcccgataagctggtggcgaaaggtttgccgcctgagatgatggagatggcgaagcagaaagcgcaggaaattcagcaggcatatgagctgataaagcagcagaaagggtttaaatgaccctgtaaatgatgctgagtaactgcccacgattaaaggtggccgccctggcggtcacttctttgagaaaaggcgtttactcagaatggtggacaggctcaatgcacggtttacgggaggggttctgtaggttttatcgcgttgaccctgcttaaggttgagagctttacgacgagcggaattatatttttacgtcttaaaaataaaaaacacatacctgaatgagcgatttttgaaagtatatttattcagaacgcgcatcatgagtttttaactcaatgcgaggctattaccatgaaagtatcagttccaggcatgccggttacacttttaaatatgagcaagaacgatatttataagatggtgagcggggacaagatggacgtgaagatgaatatctttcaacgcttgtgggagacgttacgccatctgttctggtcagataaacagactgaggcttataaacttctgttcaatttcgtgaataaccagactggcaacatcaacgcctcagaatactttactggggctatcaacgagaatgagagagaaaagtttatcaatagcctggaattattcaataaacttaaaacatgcgcaaaaaatccggatgagttggtcgcaaagggcaatatgcgctgggtcgcccagaccttcggggatatcgagttaagtgtcacttttttcattgaaaagaataagatatgtactcagacgttgcagctgcataagggccaaggtaacttgggcgttgatcttagaaaggcttaccttcccggcgttgacatgagggattgttaccttggtaaaaaaacaatgaaaggtagcaatgatatcctttatgagagacctgggtggaatgctaacctgggcgtgctaccccggacggtgctaccccggacggtgctaacccggacggtgctaacctggacggtgctaccgtgaacggtgctacctccttatatgatgaggtaattattattaataaaatcccccccaaaaaaattgatactaaaggagttgctactgaagaagttgctactaaaaaagtactgctgaacaaattactgacaacgcaattattgaatgagccagaataagctaaggttgaaggggctggaacgccccttcaaccttagcagtagcgtgggatgatttcacaattagaaagacctgcatgatgagctagagaagaggctagtgacgcaaggcgtcgtgcaggacacggatcaccgagatgggcatcgccaaccagactgctaattagcccatgaataacaatcagaaaggaccataacagacccgttaaaatgaaatataagagacggtcaacgggtgaagaaaaagttcaaaaattcgctgtggagcaggaagggaattaccgaatggaaagcgtagccacacgcaacaactgaaagcagtttggcagaaacaaaaaatccccggactcggggatttatgtacaagaggcagcccttaggatgagggtataaacgtacaggaaaggttaaaaatccgctggcgctttaaacgtcatactattgccatacgccggatgggtaatcgtcaacatctctgcatgtagcaacaaacgtggtgccatcgctctcgcttctggtgatgcataaaaacgatcgccgagaatcggatgacccagcgccagcatatgcacacgcaattgatgcgaacgcccggtaatcggttttaacaccactcttgccgtgttatccgccgcatactccaccacttcatattccgtctgcgcaggtttacccgtttcgtaacagactttctgtttcgggcggtttggccagtcgcaaatcagcggcagatccaccagaccttctgcgggggatggatgcccccagacgcgggccacatactgctttttcggctcgcgctcgcggaactggcgttttaactcccgctccgcggctttggtcagcgccactacaatcacgccgctggtagccatatccagacgatgcaccgattctgcctgcggataatcacgctgaatgcgcgtcatcacgctgtctttgtgctcttccagacgacccggcactgacaacaaaccgctcggcttgttgaccaccataatatggtcatcctgatacaggataaccaaccagggttcctgcggtggattgtagttttccatccccattttcggctccgttactgatgcgttacaacgatcaaacgcagggcatccagacgccaacctgcctgatccaggctttccattacctgctgacggttgctctcaatggcggtcagttcgtcgtcacgaatgttcgggttcactgcacgcagagcttccagacgagacagctcggcagacagtttttcgtcggcttcgttacgcgctgcatcaatcaatgcacgggcagatttctcgatctgcgcttcacccagttgaaggatagcgtgaacatcctgctgcacggcgttaaccagtttgctgccggtgtgacggttaaccgcgttaagctggcggttaaaggtttcaaactctacctgcgccgccaggttgttgccgtttttatccagcagcatacgtaccggcgtcggtggcaggaagcggttgagctgcaactgcttcggagcctgggcttcaaccacataaatcagttccaccaacagcgtacctaccggcaacgctttgttttttaacagtgaaatcgtgctgctaccggtatcgccagaaaggatcagatccagaccgttgcggatcagcggatgctcccaggtaataaactgtgcatcttcacgcgccagcgccacttcacgatcaaaggtgatggtgatgccatcttccgacaggccagggaagtccggcaccagcatatgatcggacggcgtcagcacgatcatgttgtcgccgcgatcgtcctgattgataccgataatatcgaacaggttcatggcgaaggcgatcaggttggtatcgtcatcctgctcttcaatgctttctgccagtgcctgggctttttcgccaccgttggagtggatttccagcaggcggtcacgaccctgttccagctgtgctttcagcgcttcatgttgctcgcggcagtttttgatcagatcgtcaaagccttcggtttgatccggtgaagccagatagttaatcagatcgttgtatacgctatcgtaaatagtgcgtccggtcgggcaggtgtgctcaaatgcatccagaccttcgtgataccagcgcaccagcaccgactgagcggttttctccagataaggcacatggatctgaatatcgtgcgcctggccgatacgatccagacgaccaatacgctgctccagtagatccgggttgaatggcaggtcaaacatcaccatgtggctggcgaactggaagttacgtccttcagaaccgatttctgagcacagcagtacctgtgcgccggtgtcttcttcggcaaaccaggcggcagcgcggtcacgttcgataatcgacataccttcgtggaacaccgcagcgcgaataccttcacgttcgcgcagtacctgctccagttgcagcgcagtggcagctttggcgcagatcaccagcactttctgagagcgatggctggtcaggtagcccatcagccactcaacgcgcggatcgaagttccaccaggtggcgttatcaccttcaaattcctgataaatacgctccgggtagagcatatcgcgagcacgatcttccgcacttttacgtgcgcccataatgccggagactttaatagccgtctgatactgcgtcggtagcggcagcttaatggtgtgcagctcgcgtttcgggaatcctttcacaccgttacgcgtgttacggaacagcacgcggctggtgccgtggcgatccatcagcatcgaaaccagctcctgacgggcgctctgggcatcttcgctgtcgctgtttgctgcctgcaacagcggctcgatatcctgctcgccgatcatctcgccgagcatgttcagttcgtcattgctcagtttgttacctgccagcagcatggcaacggcgtccgcaaccggacgataatttttctgctcttcaacgaactgcgcaaaatcgtggaaacggttcgggtccagcagacgcagacgggcgaagtggctttccatccccagctgttccggggtcgcggtcagcagcagaacgcccggcacgtgctctgccagttgttcaatggcctgatattcacggcttggcgcatcttcgctccacaccaggtgatgcgcttcatcgaccaccagcaggtcccattcggcttcacagagatgttccaggcgctgtttgctacgacgggcaaaatccagcgagcaaatcaccagctgttcggtgtcaaacgggttgtaagcatcgtgctgagcttcggcataacgctcatcatcaaatagcgcaaagcgcaggttgaaacggcgcagcatttctaccagccactgatgctgtaaggtttccgggacgataattagcacacgttcagcagcgccagagagcagttgctgatgcaggatcatcccggcttcaatggttttccctaaacccacttcgtcagccagcaggacgcgcggcgcgtggcggcgaccaacatcatgagcgatgttgagctgatgcgggatcaggctggtacgctgaccgcgcaggccgctgtacggcatacggaactgttcgctggaatatttacgcgcgcgataacgcagcgcaaagcggtccatacggtcaatctgcccggcaaacagacggtcctgcggtttgctgaacaccagtttgctatcaaggaaaacttcacgcagggctacgccggactcttcagtatccaggcgagtaccgatataggtcagcaagccattttcttcttttacttcttcgacttgcatctgccagccgtcatggctggtaatggtatcaccagggttgaacatcacgcgggtcacgggggaatcactgcgtgcgtacagacggttttcaccagtagatgggaaaagtaaagtgacagttcgcgcatccaccgcgacaacggttccaagtcccaattcgctttctgtatcgctgatccagcgttgaccaagtgtaaaaggcatatgtgttcggctctatatctttaattgcaggcaataaccacccgctaccgtgcttatgaggtagtggtgttattcaggtccaggaatggaaagggcgctatggtactggatggcaaagcattcgtcacgcatcaaaatggtatctggcgaactcttttttttgctcaaaatagcccaagttgcccggtcataagtgtagcaaaattatcctcaataaaagggagtattccctccgccacgggttgtagctggcgggtcagatagtgttcgtaatccagtggtgaacgttggtagtccagcggctccgggccgttggtggtccatacgtacttaatggtgccgcgattctgatattgcaaggggcgaccacgcttttggttttcttcatcggcaaggcgagcggcgcgtacatgaggcggcacattacgctgatactcgctcagcggacggcgaaggcgtttacggtaaaccagtcgcgcatccagttcacccgccatcagtttgtcgatggtttcgcgtacatattcctgatatggctcgttgcggaagatgcgcaggtatagctcctgctgaaactgctgggccagcggcgtccagtcggtgcgcacggtttccagccctttaaacaccatccgctgcttgtcgccctcctgaatcagtccggcataacgctttttactgccggtatcggctccgcgaatggttggcatcagaaaacggcagaaatgggtttcatactccagttctaatgcgctggtcagccgttgtttttgcagcgtttccgcccaccaggcgttaacgtgctgcaccagtgcacgaccgattttcgccgcttcttcttccgaatgtgcgcctttcagccagacaaacgttgagtcggtatcgccgtagataacgtcgtagccctgtgcttcaatcaacgctttggtttgccgcatgatctgatgaccacgcatggtgatcgacgatgccagccgcggatcgaagaagcggcaggcggtggtgccgagcacgccataaaaggcattcatgatgattttcagcgcctgcgacagcggtttgttaccctggcgtttggcttcatcgcgcccgtgccagatgttagtcacaatctccggcaggcaatgtttttctcgcgagaaccaggcatcgagaaaaccttcggtactgtgctctggatcaggctgcgccatgccttccaccagcccgacgggatcaatcagaaaggtgcggatgatcgacgggtacaggcttttatagtccagcaccagcactgaatcataaagccctggccgtgaatccatcacgtagccgccagggctggcgtgcggcggcacttcgccgagattaggcgcgacataaccagcgcgatgcattcgcggaaaatagagatgaccaaatgccgccaccgaaccgccgtgtcggtccaccggcaggccgttcaccgttgcccgttcgagtaaaaatggcatgatttcagttttgtggaagatctgcgtcaccagctcgcaatctttcaggttataagttgccagcgcaggtttatcttcggcgaaacggcggtcaatttcgtccattcgatcccacgggttatcgatagattttccttcgcctaatagctcctgagcgacagtttccagcgagaatgaagagaaattccagaacgcggatttcagcgcctcgataccgtcgataattagccgacctttagcctgggcaaaaaagacgccgtttttaaagccgtgctcgcgccactccagctcgctattatcgcgcccaagacgcagcggaagacggtaacgctcggcatgtttttgcagcattcgcagatcgaactgcaccacgttccaaccgatgatcacatcaggatcgtagttggcaaaccaggcgttgagtttttccagcaactgcgggcggctggcgacgtattccagttcgaaatcaagcgaggaggcgtcgccattctccggccccagcatataaacgatgcgctgcccgcagccttccaggccgatgcagtacagctcaccgtggcgggtggtttcaatatctatagaaacccacttgagcggcggacgatagtcgggatgcggtttcagacgggcattaacgatagtgccattgtgcatatcaccctcgacccacaccggtgaggtgataaaccgctccatcagatagcgttctggcggacgcacatcggcctcgtagacggtaacgccaccttcacgcaggcgcttttcgtaattcatcaattggcgatgggcgcgacagtaaaggccatacaccggctggcggtgaaaatcctttaacgccagcggtgtcaggcgaaagccttgttcaccctgcaaaatatgctgagcgcggggaacctgatcggcgggaataaacgccacggactcttgcggtgcaagcgtaacctgcaacggcccgttgtccgtcgccagccagaaggagacttctgtcccttgcggggtgtcccgccagtgtcgggttaagataaaacctgcctgcgccacgctgaaaatccatcaaaaaaccaggcttgagtatagcctggtttcgtttgattggctgtggttttatacagtcattactgcccgtaatatgccttcgcgccatgcttacgcagatagtgtttatccagcagcgtttgctgcatatccggtaactgcggcgctaactgacggcagaatatccccatataagcgacctcttccagcacgatggcgttatgcaccgcatcttcggcatttttgccccatgcaaacgggccgtgggaatggaccagaacgccgggcatttgcgctgcatcgataccctgtttttcaaaggtttctacgatgacgttaccggtttcccactcatattcgccgttgatttctgcgtcggtcattttgcgggtgcagggaatggtgccgtagaaatagtcggcgtgggtggtgccggttgctggaatcgactgacccgcctgcgcccagatggtggcgtggcgcgagtgcgtatgcacaatgccgccaatggaggggaatgcctgatagagcagccggtgagttggcgtgtcggaggagggctttttcgtaccttcaaccacttcaccggtttcgatgctaaccacgaccatatcgtcagcggtcatgacgctgtaatcgacgccggaaggtttgatcacaaagacgccgcgctcgcgatcaacggcgctgacgttgccccatgtgagcgtgaccaggttgtgttttggcagcgccaggttggcttctaatacccggcgcccgagacccgcacgcgtcgacctgcaggtatggagaaacagtagagagttgcgataaaaagcgtcaggtaggatccgctaatcttatggataaaaatgctatggcatagcaaagtgtgacgccgtgcaaataatcaatgtggacttttctgccgtgattatagacacttttgttacgcgtttttgtcatggctttggtcccgctttgttacagaatgcttttaataagcggggttaccggtttggttagcgagaagagccagtaaaagacgcagtgacggcaatgtctgatgcaatatggacaattggtttcttctctgaatggtgggagtatgaaaagtatggctgaagcgcaaaatgatcccctgctgccgggatactcgtttaacgcccatctggtggcgggtttaacgccgattgaggccaacggttatctcgatttttttatcgaccgaccgctgggaatgaaaggttatattctcaatctcaccattcgcggtcagggggtggtgaaaaatcagggacgagaatttgtctgccgaccgggtgatattttgctgttcccgccaggagagattcatcactacggtcgtcatccggaggctcgcgaatggtatcaccagtgggtttactttcgtccgcgcgcctactggcatgaatggcttaactggccgtcaatatttgccaatacgggtttctttcgcccggatgaagcgcaccagccgcatttcagcgacctgtttgggcaaatcattaacgccgggcaaggggaagggcgctattcggagctgctggcgataaatctgcttgagcaattgttactgcggcgcatggaagcgattaacgagtcgctccatccaccgatggataatcgggtacgcgaggcttgtcagtacatcagcgatcacctggcagacagcaattttgatatcgccagcgtcgcacagcatgtttgcttgtcgccgtcgcgtctgtcacatcttttccgccagcagttagggattagcgtcttaagctggcgcgaggaccaacgcattagtcaggcgaagctgcttttgagcactacccggatgcctatcgccaccgtcggtcgcaatgttggttttgacgatcaactctatttctcgcgagtatttaaaaaatgcaccggggccagcccgagcgagtttcgtgccggttgtgaagaaaaagtgaatgatgtagccgtcaagttgtcataattggtaacgaatcagacaattgacggcttgacggagtagcatagggtttgcagaatccctgcttcgtccatttgacaggcacattatgcaagcattgctggaacactttattacccaatccaccgtgtattcattgatggcggtggtgttggtggcctttctggagtcgctggcgctggtcggtttgattctacccggtacggtgctgatggcggggctgggagcgctgattggcagcggcgagttaagtttctggcacgcctggctggcagggattattggctgcttgatgggcgactggatttctttctggctgggttggcgttttaaaaagccgttgcatcgctggtcatttctgaagaaaaacaaagcactacttgataaaactgaacatgcgttgcatcaacacagcatgttcaccattctggtcggtcgttttgttggcccgacgcgtccgctggtgccaatggtggcgggaatgctggatctgccggtggctaaatttattacgccgaatattatcggctgcctgctgtggccgccgttttacttcctgccagggattctggcgggcgcggcgatcgatattcctgccggaatgcagagcggtgagtttaaatggttgctgctggcaacagcggtgtttttgtgggttggtggctggctgtgctggcggttatggcgcagcggtaaagcgactgaccgtttgagtcattatttgtcccgcggtcgtttgttgtggctgacgccgttgatttctgccatcggcgtggtggcgctggtggtgttaattcgccacccgttgatgccggtgtatatcgatattttgcgtaaagtggttggggtttaggagatagtcttgtgcgggttgcctgatgcgacgcttgccgcgtcttatcaggcctacaaaacgcactacccgtaggtcggataaggcgttcacgccgcatccgacagtgcatactaacccgtaatccccaatagtgccgaagcactcgccttaccgctcaacaactcattggtcataccctgccaggcgatgcgcccgtcggcgactactaccgagcgcgtggcgatccgcgccgcatcttccacgctgtgcgacaccatcaatagcgtcattttttgctgctggcagctcgtgctcaccagcgtcaacatctcctgacgtaacgccggatcgagcgcagagaacggttcatcgagcaataaaatcggctgttcgcgtaccagacaacgcgctaacgccactcgctgtcgctgaccgccggaaagctcgcccggtaaccgcgccattaaattatcaatccccatctggcgggcgatagcgtgcattttcccctgctgtaccgcgttcagtttcaatcccggatttagccccagcccgatgttctgtgcgaccgtcaggtggctgaacaggttgttctcctgaaacagcatcgacaccggacggcgtgacggcggcatagttgtgtgatctacgccatcgatagtcagcgaaccgctggctggcgtcagaaaaccggcgatcaaattcagcagggtacttttacccgcgccgcttggcccgaggatcgccacctgctcgccgcgttccaccgttaagctaaaacgcatcggcaaatggtggtaaagccaggtgatatcagtcagttttaacatttcgccccggtagtttttcaatcacggtaaacagcagaaaacagagcagcagcagaattaacgcggtgaccgcaccgtcctggctgcgataggagccaatttgctggtagagataaaacggcagggtgcggaaatcatcgttaccgaacaacgccaccacgccaaaatcaccaatcgacagcacgcatgcaaaggccagcgcctgcgccagtggacgtttcagggcgcgcagctccaccacttttaagcgtgaccagccttcaatccccagcgactgacataacatgctgtagcgggcggtgatatcgcgcatcgggttttccagcactttcagcgcataagggatcgccattaacgcattggtgaaaatcacaatgccgtcagcagattgtggcaggccgatagtgttgttgagcagtaaaaagaagccggtagccagcacaatccccggcatggcgaggatcaacatgccgctcatctccagcacctgacccgccagcattttctgccgcgcccgcagttcgcgactgctccatagcagcatcatggtcagcactacgcacaatacacctgccgccagcgcaatacgcaacgaggtccacagcgcctgccacagcaccggttgtgccagcacttccggcaactggcgatttaccccatcgacgatcaccgccagtaacggtggcagcaacagcagcagcgccagcacaattaacaccgtgtcgcaaatgcggctatgcagacgatcgtccgggtcgcgccagccttgcagcagcgtggtgccgggcgcaatggccttactcaatcgctgactcaacagcaccagcccgaggcagcacaccatctggagcagcgccagcattgccgcgcgggcaggatcgtagtcgtaactcagcgcctgatagattgccagctcgatagtggtcgcctgcggaccgccccccagcgatagcacggtggcgaagctggcgaaacagagcataaagataagcgcagcaaccggcgggatttgtcgccgtaaccacggccattcgacgaagcggaaaaaatgccagctacgcatcccaagctgggcggcaagttgacgctgttcgccggggatgttttccagtgcctggagtaataagcggctcgccatcggcagattaaaaaacacatgggccagcaaaataccttgcaggccgtagggcgaaaaggtccactccagaccgagcgattggcagagtgttgccagccagccctggcgaccatagacgctaagaatgccgaaaacagcgaccaacaccgggaggatcaaggtcattgcacacagacgcaacagcgccagccgacccggaaagcgcctgcgatagagcgcgcgggcgaggaatatcgcgggtatgacagagagcagtgccgagagaaacgcctgccagaaggagaagcgcaccacatgccacagatagctgtcctgccagactgccacccagtcatcctgcggcgcgttccaccacagggcgagaaacgccgccagcgcaaccgctaccaccagcgtggtggcgcttacacctggaattaaccagccgggaattaacggctgacggcgcgttgccattcgctaatccatgcctgacgttgtgccgccacttcggctggcgtgaactccaacgtggttgcgggtttggtcaatttttcaaaaccggcaggcagcgtgacgtttgccaccggatacatccagttgccggttgggatcgcattctggaaagccggagaaaccataaactggaggaatttttgcgccagctccggctgcttgctggcagcggtgcgggcggcgacttccacttgcagatagtgaccttcgctgaagttcgcggcggcgtagttatctttcttctcttcgagaatgtgataagccggagaggtggtgtaactcagtaccagatcgctttcaccttttaaaaacaggccgtaggcttcgctccagcctttggtgaccgtgaccgttttcttcgccagtttctgccaggcttgtggggcgtcatcgccatagactttttgcatccatagcaacagacccagccccggtgtactggtgcgcggatcctgataaatcacccgccagttttgatcgctctcaaccagttctttcaggctttgtggcgggtttttcagtttgttcttgtcataaacgaaggcgaagtagccataatcaaacggtacgaaagtgtcattattccagccgccgggaacgttaacggcatccgctgccacaccgcttttggcaaacagtccggttttactggcggcgtctaacaggttgttatccagccccagcaccacatcggctttactgtttttgccttccatccgtagacggttgagaagcgaaacgccatcttccagcgccaccagtttcagttcgcaattacagtcggcttcaaaggcttttttaaccaccggaccaggcccccagtcggcggcgaaggaatcgtaggtataaacagtcagaacgggtttagcgaaaacgggcgctgtgcacagcaacagcaggggcagacatttttttaacactttgcacctcaaaaaagagtggcaaaggacttgagaaggagcctcaaatcccttcgccggcgttatccggatcaggttcgacgggtattttctcagcgcacgcgtacgcgtggcaccccgttgagaacggcgttagtgtagtgattttgttatcaaccagcaatcatggatccggtggcgcaaaccacgctgatttaaaatcgaaccagccgagggtattcatgcgcaggccgcgcatactgcgttgcccctgaatgatcagccagtggtgcaataatggcaccatcgctttgctggcgaccagttgctggcaccagttcgccagattcatctcgccattgcgccagcgagcagcgtcggcttgccagtcaatgggaatgcaatgttgtagcagtggcacttcgcataaatgtgcgaaaacagagaagtccagcggcagggtaaagttggcgctgtttagccagatatcactttcgatctctcctgtatgccactgatcgtagtcgatctctttgattttcagcgtgacctggtgacttgccagaatctgctgcatgatcccggcaatcacccgatgctcactgtgatcctgataaaaggttagggtgaggctttccaggccagccggtttttcgctctttatggtgcgggcatggtgccaacgggggagcagtccataagccgggaaccacagttgctggtactgttcctcagcgaaatagaccagattagttggagaaagcacatagcttacccagtccctgacttgctgattcgccccgcgatgggtgcggctgtcgaacagtaaatagtagcaaccttcctccaggcggctttcaatctctttttcctcgccctgtggaccttttagcatcagccctccggctggctcgtcggcaatttccggcagaacccagacgttaacttcgtcgattaatgcccggtaaccgaagaagtcatcgaatgcctgaattttcagttgattggtgctgttgcgaatcaccgcatacggaccggtgccgatgggatggctggcaaagttactgagggtttcccattcgcgcggcaggatcatcgccggaacttgccccagcagtaacggtaaccagcggtccggttgcgtgagatggatatccagcgtccagggcgtcggcgacacaatgtcagcaatatgcgaatagagcggcagcgtattgattcgttttaaagaggcgatcacatcgtccatttccagttcacgaccatggtgaaaatggactcctggacgcaaaaagaaacgccagtgaagcggtgaaatttgctgccagtggtgggcgatgtctgcttccagttccccattttcctcatttatgcgcgttagcgaactgaagatttgccgggcgatatgggtttcggaacggcgcaatgcgctgccaggtagcagattacgcaacggacgatagtagagcacgcgcaggatgtgccgcccctggcggaagctgcggcccagatgagaaaccagcatttgccgcacagtcgctttgtcgccaaccaactgcaccagttgatcgatacgatcctgctccagcaggtcttccgcccgctgttgctgaagcgccagcccggtatagaggaatgtcagacgcgagcgtttaccgcgcccgacttccgcttcccacgtcagccagccgcgatcctgcatggtgttgagcagggtgcgcatatgacgacgcgagcagctcaataacgctgccagttcgttgagcgttgtgtcctgcgatttaccctcgcagcattgccacaggcggatgaactgttgttgcagacgagcagatggcataaaaggggaactcctgtgcaaaagacagcaattttattttccctatattaagtcaataattcctaacgatgaagcaagggggtgccccatgcgtcagttttatcagcactattttaccgcgacagcgaagttgtgctggttgcgttggttaagcgtcccacaacgattaaccatgcttgaaggactgatgcagtgggatgaccgcaattctgaaagttgacttgcctgcatcatgtgtgactgagtattggtgtaaaatcacccgccagcagattatacctgctggttttttttattctcgccgcgctaaaaagggaacgtatgatctggataatgacgatggctcgccgtatgaacggtgtttacgcggcatttatgctggtcgcttttatgatgggggtggccggggcgctacaggctcctacattgagcttatttctgagtcgtgaggttggcgcgcaacctttctggatcggcctcttttatacggtgaatgctattgctgggatcggcgtaagcctctggttggcaaaacgttctgacagtcagggcgatcggcgaaaactgattatattttgctgtttgatggctatcggcaatgcgctattgtttgcatttaatcgtcattatctgacgcttatcacctgtggtgtgcttctggcatctctggccaatacggcaatgccacagttatttgctctggcgcgggaatatgcggataactcggcgcgagaagtggtgatgtttagctcggtgatgcgtgcgcagctttctctggcatgggttatcggtccaccgttggcctttatgctggcgttgaattacggctttacggtgatgttttcgattgccgccgggatattcacactcagtctggtattgattgcatttatgcttccgtctgtggcgcgggtagaactgccgtcggaaaatgctttatcaatgcaaggtggctggcaggatagtaacgtacggatgttatttgtcgcctcgacgttaatgtggacctgcaacaccatgtacattattgatatgccgttgtggatcagtagcgagttaggattgccagacaaactggcgggtttcctgatggggacggcagctggactggaaataccagcaatgattctggctggctactatgtcaaacgttatggtaagcggcgaatgatggtcatagcagtggcggcaggagtactgttttacaccggattgattttctttaatagccgtatggcgttgatgacgctgcaactttttaacgctgtatttatcggcattgttgcgggtattgggatgctatggtttcaggatttaatgcctggaagagcgggggcagctaccaccttatttactaacagtatttctaccggggtaattctggctggcgttattcagggagcaattgcacaaagttgggggcactttgctgtctactgggtaattgcggttatttctgttgtcgcattatttttaaccgcaaaggttaaagacgtttgatgacgtggacgatagcggaaagcccggtcatttgaccgggcaaggggattaattcataaacgcaggttgttttgcttcataagcggcaatggcgtcgtcgtgctgcaaggtaagcccaatactgtccagaccgttcatcatgcagtggcggcggaaggcatcgatggtaaagcgataggttttctctcccgctttcacctcttgcgcttccagatccacgtcgaaatggatccccggattagctttcaccagcgcaaacagttcgtccacttctgcatcgcttaatttcaccggcagcagctggttgttaaagctattgccgtagaagatgtcagcaaaactcggcgcaatcaccactttaaaaccgtagtcggtcaatgcccagggcgcgtgctcacgcgaagagccacagccgaagttttctcgtgccagcaaaatggaagcgccctgatactgcgggaagttcagcacgaagtccgggtttggctgttggcctttttcatccagaaaacgccagtcgttaaacagatgcgcgccaaaacccgtacgggtcactttctgcaaaaactgtttcgggatgattgcatcggtatcgacattggcggcatccagcggaaccaccaggcctgtgtgtttgataaatttctctgccatggtgtgctccttatttaatgttgcgaatgtcggcgaaatgtccggtcacagcagcagcggcagccattgccgggctgaccagatgcgtgcgcccgccgcgcccctggcggccttcaaagttacggttgctggtggaggcacaacgttcgcccggattcagacggtcgttgttcatcgccagacacattgagcagccaggcaagcgccattcaaaaccggcttcaataaagattttatccagaccttccgcttccgcctgggcttttaccgggccagagccgggaaccaccagtgcctgcacgcctggcgcgacttttcgccctttggcgatctccgctgccgcgcgtaaatcttcaatgcgcgagttggtacaggaaccgataaacactttgtcgatagccacttcggtcagcggaatacccggtttcagccccatataggccagcgctttttctgccgacgcgcgttcaaccggatcggcaaacgaagccggatcgggaatattgtcgttcacggaaatcacctggccgggattggtgccccaggtgacctgcggtgaaatttcttctgcttgcagagtgacaacggtatcgaaagttgcgccttcgtcggtttgcagggttttccagtaggcaacggcgtcgtcgaaatctttgcctttcggcgcatgcagacggcctttgacatagttaaaggtggtttcgtccggtgcaaccagaccggcttttgcgcccatttcgattgccatattgcacagggtcatacgaccttccatgcttaaatcacggattgcttcgccgcaaaactccaccacatgcccggtgccgcctgcgctaccggttttaccgataattgccagcacgatatcttttgcggtaatgcccggcgcggctttgccctggacttcaattttcatggtttttgcgcggccctgtttcagggtttgcgttgccagtacgtgttcaacttcggaagtgccgataccaaaggccagtgcgccaaacgcgccgtgggtggcggtatgcgagtcgccgcagacaatggtcatccccggcaaggtgacgccctgttccggccccattacgtggacgatcccctgatacgggtgattcaggtcatacagttcgacgccaaattctttgcagtttttgatcagttcctgcatctggatacgcgccatttcaccgcaggcattaatgtctttggtctgggtagagacgttgtgatccatggtagcgaaggttttgcccggctgacgtaccgggcgaccgtgggcgcgcagaccatcgaacgcctgcggtgaggtcacttcatgcaccaggtggcggtcgatatataacagtggggtttcgttttcggcttcgtacacaacgtgagcgtcgaacaatttttcgtataacgtcttagccatgattacaccccttctgctacatagcgggcaatgatatcgcccatttcatcggtactaacggcggcagcgccacgggctaaatccccggtgcgaatgccttcttctaatgcgcggttaatggcgcgttcaatggcgcaagccgcatcatcggcatccaggctgtaacgcagcagcagtgccagcgaaaggatttgtgcaatcgggttggcgatgtttttgcctgcgatatctggtgccgagccgcccgccggttcatacagtccaaaaccttgctcgttcaggctggcggaaggcaacatccccatcgagccagtgatcattgcgcactcgtcagacagaatgtcgccaaacaggttggagcacagcagaacgtcaaactgtgatggatctttaatcagctgcatggtggcgttgtcgatgtacatatgcgccagttcgacatccgggtattccgtggcgatctcgttaacgatctcccgccataaaatagaggattgcagcacgttggctttatcgatcgacgtcactttgtggcgacgcttgcgagcagattcaaacgcgatgcgggcgatacgttcgatctcaaaacggtgatacacctcggtatcaaaggctttttcatattgtccgctaccttcgcggccttttggctgaccgaaatagatgccgccggtcagttcgcgcacacacaggatgtcgaagccgtttgcggcaatgtctgcacgcagcggacagaatgcttccagcccctgatacagttttgccgggcgcaggttgctgaataatttgaagtgcttacgcagaggcagcagcgcgccgcgttctggttgctggtctggtggtaaatgttcccacttcgggccgcctaccgagccaaacagcacggcatcggcttgctcacaaccttcaaccgtcgcaggcggcagtggttgcccgtggttatcaatggctgcgccgcctacatcgtaatggctggtggtgatgcgcatcgcaaagcggttgcgcacggcatccagcactttcagcgcctgggtcatcacttccggaccaataccgtcccccggcaatacggcaatatggtaattcttcgacatcacacggtttccttgttgttttcgttgtgttgagctttgcgttgcaactctttttcgacttctgcggcacgccagatattgttcagaacgtgcaccatggctttggcagatgactcgacaatatcggtagccaggccgacgccgtggaagcggcgaccgttgtagttagcgacgatatccacctgacccagcgcatctttaccgtggcctttggcggtcaggctgtatttcaccagttcgacgttatattcagtgatgcggttaattgcctgatagacggcatcgaccggaccgttaccgttggcggcttctgctttgacttcttcgccacaggccagtttgacggcggcggtggcgatatcgttagagccagactgcacgctgaagtaatccagacggaaatgctccggctcttcttgctgcttaccgatgaaggccagcgcctccagatcgtaatcaaacacctgaccttttttgtccgccagcttcaggaaagcatcgtacaaattgtctaaattatattcactttctttataccccatctcatccatgcgatgtttcaccgccgcacgccccgaacgagaggtcagattcagctggatttggttcagaccaatagattctggtgtcatgatttcgtagttttcgcggtttttcagcacgccatcctggtgtataccggaggagtgtgcgaatgcgccgctgccaacaatggctttgtttgccgggatcggcatattacaaatctggctaactaactggctggtgcgccatatctcctggtgattaatggcggtgtggacgttgagaatatccttacgaactttgatcgccatgatgacttcttccagggaacagtttccggcacgctcgccgatcccgttcattgcgccttccacctggcgtgcaccggcatgtaccgccgccagtgagtttccgaccgccaggcccaaatcgtcgtgggtatgtacggagataatggctttgtcgatgttaggcacgcgttcatacaggccgctgatgattccggcgaactcaaacggcatggtgtagcccacggtgtccggaatgttgatggtggtggcaccggcattaatcgccgcttcgaccactcgcgccagatcggcaatgggtgtacgcccggcatcttcgcaagaaaattcaacatcatcggtgtaattacgggcgcgtttcaccatatagatagcgcgttcgatcacctcgtccagcgtgctgcgcagcttggtggcgatgtgcattggcgaagtggcaataaaggtatgaatacggaaggcttcggcgactttcagggattcggccgccacgtcgatatctttttccacgcagcgagctaacgcacatacgcggctgtttttaacctggcgggcgatggtttgcaccgattcaaaatcgcccggcgaagagacggggaaaccgacttccatcacgtcaacacccatacgctcaagggccagcgcaatttgcagtttttctttcacactcaagcttgcctgtaacgcctgttcaccgtcgcgcaatgtggtatcgaaaataatgacttgctggctcatggtttgggtccttgtctcttttagagcgcctcgcttcgggcataaaaaaacccgcgcaatggcgcgggttttttgtttgactgcgtgctggcttaatgctggatgccgctcactcgtctaccgcgcaaagaagatgcgtttagtagtagtagaccgataaagcgaacgatgtgagtcattaaatcagctccagatgaatgcgatatgcttttagagttactggatacaaaaacggatgtcaaccctgacgcaataaaaacgtcccgccagcgtgagttctgcatccgtaaaattagctaattgtgctgcggtggttaaagtaagcgatattaatttctgcttaactaccgacgcttttcatcggttgacatatttcagcataaatttttgcatctaatcaacgaggaaaaaggggacaaaatgcacgcgttgcaaaacctatcctgatgatttgtattgaattatatgttttgcgattttttttgatattgatttggtgaatattattgatcaattaatgttaagaattaatgcattaaatatataaattaattattaaataagcacatttaatccattttgtagatgattgagtattcgcggtagttatgattagattgttttcgcaacaaaaacattatggattattatgctgtggtaaatgactcattccacggcaatggattctgtttttatcagaacccgtatctttatgttttccgaattttactcattttgctttttcttattttatatgcatgataaatcatattcttcaggattatttctctgcattccaataagggaaagggagttaagtgtgacagtggagttaagtatgccagaggtacaaacagatcatccagagacggcggagttaagcaaaccacagctacgcatggtcgatctcaacttattaaccgttttcgatgccgtgatgcaggagcaaaacattactcgtgccgctcatgttctgggaatgtcgcaacctgcggtcagtaacgctgttgcacgcctgaaggtgatgtttaatgacgagctttttgttcgttatggccgtggtattcaaccgactgctcgcgcatttcaactttttggttcagttcgtcaggcattgcaactagtacaaaatgaattgcctggttcaggttttgaacccgcgagcagtgaacgtgtatttcatctttgtgtttgcagcccgttagacagcattctgacctcgcagatttataatcacattgagcagattgcgccaaatatacatgttatgttcaagtcttcattaaatcagaacactgaacatcagctgcgttatcaggaaacggagtttgtgattagttatgaagacttccatcgtcctgaatttaccagcgtaccattatttaaagatgaaatggtgctggtagccagcaaaaatcatccaacaattaagggcccgttactgaaacatgatgtttataacgaacaacatgcggcggtttcgctcgatcgtttcgcgtcatttagtcaaccttggtatgacacggtagataagcaagccagtatcgcgtatcagggcatggcaatgatgagcgtacttagcgtggtgtcgcaaacgcatttggtcgctattgcgccgcgttggctggctgaagagttcgctgaatccttagaattacaggtattaccgctgccgttaaaacaaaacagcagaacctgttatctctcctggcatgaagctgccgggcgcgataaaggccatcagtggatggaagagcaattagtctcaatttgcaaacgctaactgattgcagaataggtcagacatgaatgtctggtttattctgcattttttattgaatgtagaattttattctgaatgtgtgggctctctattttaggattaattaaaaaaatagagaaattgctgtaagttgtgggattcagccgatttattatcaatttaatcctctgtaatggaggattttatcgtttcttttcacctttcctcctgtttattcttattaccccgtgtttatgtctctggctgccaattgcttaagcaagatcggacggttaatgtgttttacacattttttccgtcaaacagtgaggcaggccatggagatgttgtctggagccgagatggtcgtccgatcgcttatcgatcagggcgttaaacaagtattcggttatcccggaggcgcagtccttgatatttatgatgcattgcataccgtgggtggtattgatcatgtattagttcgtcatgagcaggcggcggtgcatatggccgatggcctggcgcgcgcgaccggggaagtcggcgtcgtgctggtaacgtcgggtccaggggcgaccaatgcgattactggcatcgccaccgcttatatggattccattccattagttgtcctttccgggcaggtagcgacctcgttgataggttacgatgcctttcaggagtgcgacatggtggggatttcgcgaccggtggttaaacacagttttctggttaagcaaacggaagacattccgcaggtgctgaaaaaggctttctggctggcggcaagtggtcgcccaggaccagtagtcgttgatttaccgaaagatattcttaatccggcgaacaaattaccctatgtctggccggagtcggtcagtatgcgttcttacaatcccactactaccggacataaagggcaaattaagcgtgctctgcaaacgctggtagcggcaaaaaaaccggttgtctacgtaggcggtggggcaatcacggcgggctgccatcagcagttgaaagaaacggtggaggcgttgaatctgcccgttgtttgctcattgatggggctgggggcgtttccggcaacgcatcgtcaggcactgggcatgctgggaatgcacggtacctacgaagccaatatgacgatgcataacgcggatgtgattttcgccgtcggggtacgatttgatgaccgaacgacgaacaatctggcaaagtactgcccaaatgccactgttctgcatatcgatattgatcctacttccatttctaaaaccgtgactgcggatatcccgattgtgggggatgctcgccaggtcctcgaacaaatgcttgaactcttgtcgcaagaatccgcccatcaaccactggatgagatccgcgactggtggcagcaaattgaacagtggcgcgctcgtcagtgcctgaaatatgacactcacagtgaaaagattaaaccgcaggcggtgatcgagactctttggcggttgacgaagggagacgcttacgtgacgtccgatgtcgggcagcaccagatgtttgctgcactttattatccattcgacaaaccgcgtcgctggatcaattccggtggcctcggcacgatgggttttggtttacctgcggcactgggcgtcaaaatggcgttgccagaagaaaccgtggtttgcgtcactggcgacggcagtattcagatgaacatccaggaactgtctaccgcgttgcaatacgagttgcccgtactggtggtgaatctcaataaccgctatctggggatggtgaagcagtggcaggacatgatctattccggccgtcattcacaatcttatatgcaatcgctacccgatttcgtccgtctggcggaagcctatgggcatgtcgggatccagatttctcatccgcatgagctggaaagcaaacttagcgaggcgctggaacaggtgcgcaataatcgcctggtgtttgttgatgttaccgtcgatggcagcgagcacgtctacccgatgcagattcgcgggggcggaatggatgaaatgtggttaagcaaaacggagagaacctgattatgcgccggatattatcagtcttactcgaaaatgaatcaggcgcgttatcccgcgtgattggccttttttcccagcgtggctacaacattgaaagcctgaccgttgcgccaaccgacgatccgacattatcgcgtatgaccatccagaccgtgggcgatgaaaaagtacttgagcagatcgaaaagcaattacacaaactggtcgatgtcttgcgcgtgagtgagttggggcagggcgcgcatgttgagcgggaaatcatgctggtgaaaattcaggccagcggttacgggcgtgacgaagtgaaacgtaatacggaaatattccgtgggcaaattatcgatgtcacaccctcgctttataccgttcaattagcaggcaccagcggtaagcttgatgcatttttagcatcgattcgcgatgtggcgaaaattgtggaggttgctcgctctggtgtggtcggactttcgcgcggcgataaaataatgcgttgagaatgatctcaatgcgcaatttacagcccaacatgtcacgttgggctttttttgcgaaatcagtgggaacctggaataaaagcagttgccgcagttaattttctgcgcttagatgttaatgaatttaacccataccagtacaatggctatggtttttacattttacgcaaggggcaattgtgaaactggatgaaatcgctcggctggcgggagtgtcgcggaccactgcaagctatgttattaacggcaaagcgaagcaataccgtgtgagcgacaaaaccgttgaaaaagtcatggctgtggtgcgtgagcacaattaccacccgaacgccgtggcagctgggcttcgtgctggacgcacacgttctattggtcttgtgatccccgatctggagaacaccagctatacccgcatcgctaactatcttgaacgccaggcgcggcaacggggttatcaactgctgattgcctgctcagaagatcagccagacaacgaaatgcggtgcattgagcaccttttacagcgtcaggttgatgccattattgtttcgacgtcgttgcctcctgagcatcctttttatcaacgctgggctaacgacccgttcccgattgtcgcgctggaccgcgccctcgatcgtgaacacttcaccagcgtggttggtgccgatcaggatgatgccgaaatgctggcggaagagttacgtaagtttcccgccgagacggtgctttatcttggtgcgctaccggagctttctgtcagcttcctgcgtgaacaaggtttccgtactgcctggaaagatgatccgcgcgaagtgcatttcctgtatgccaacagctatgagcgggaggcggctgcccagttattcgaaaaatggctggaaacgcatccgatgccgcaggcgctgttcacaacgtcgtttgcgttgttgcaaggagtgatggatgtcacgctgcgtcgcgacggcaaactgccttctgacctggcaattgccacctttggcgataacgaactgctcgacttcttacagtgtccggtgctggcagtggctcaacgtcaccgcgatgtcgcagagcgtgtgctggagattgtcctggcaagcctggacgaaccgcgtaagccaaaacctggtttaacgcgcattaaacgtaatctctatcgccgcggcgtgctcagccgtagctaagccgcgaacaaaaatacgcgccaggtgaatttccctctggcgcgtagagtacgggactggacatcaatatgcttaaagtaaataagactattcctgactattattgataaatgcttttaaacccgcccgttaattaactcaccagctgaaattcacaataattaagtgatatcgacagcgcgtttttgcattattttgttacatgcggcgatgaattgccgatttaacaaacacttttctttgcttttgcgcaaacccgctggcatcaagcgccacacagacgtaacaaggactgttaaccggggaagatatgtcctaaaatgccgctcgcgtcgcaaactgacactttatatttgctgtggaaaatagtgagtcattttaaaacggtgatgacgatgagggattttttcttacagctattcataacgttaatttgcttcgcacgttggacgtaaaataaacaacgctgatattagccgtaaacatcgggttttttacctcggtatgccttgtgactggcttgacaagcttttcctcagctccgtaaactcctttcagtgggaaattgtggggcaaagtgggaataaggggtgaggctggcatgttccggggagcaacgttagtcaatctcgacagcaaagggcgcttatcagtgcctacccgttatcgggaacagctgcttgagaacgctgccggtcaaatggtttgcaccattgacatttatcacccgtgcctgctgctttaccccctgcctgaatgggaaattatcgagcaaaaattatcgcgtctgtcgagcatgaacccggttgagcgccgtgtgcagcgcctactgttaggtcatgccagcgaatgtcagatggatggcgcaggtcgattgttaatcgcgccagtactgcggcaacatgccgggctgacaaaagaagtgatgctggttggacagttcaacaagtttgagctgtgggatgaaacaacctggcatcaacaggtcaaggaagatatcgacgcagagcagttggctaccggagacttatcggagcgactgcaggacttgtctctataaaatgatggaaaactataaacatactacggtgctgctggatgaagccgttaatggcctcaatatccgtcctgatggcatctacattgatgggacttttggtcgcggtggtcactcacgtctgatcctctcgcagcttggcgaagaggggcgtttgctggcgatcgatcgcgacccgcaggctatcgccgttgcgaagactattgatgatccgcgcttctccatcatccacggacctttctccgcgctgggcgaatacgttgccgagcgcgatcttatcggcaagatcgacggcattctcctcgatcttggcgtctcttcaccgcaacttgatgatgctgaacgtggcttttcctttatgcgcgatggtccgctggacatgcgtatggacccaacccgtgggcagtcagccgctgaatggctacaaaccgcagaagaagccgatatcgcctgggtattgaaaacctatggtgaagagcgttttgccaaacgcattgcccgcgccattgtcgagcgtaaccgcgaacagccgatgacccgcaccaaagaactggcggaagtcgtggctgctgcaacgccggtgaaagataagtttaaacatcccgcgacccgtaccttccaggcggtgcgcatttgggtaaacagtgaactggaggagatagagcaggcgctaaaaagctcgctcaacgtgctggccccgggtgggcggctttcgatcatcagcttccactcgctggaagaccgtattgtgaaacgttttatgcgtgaaaacagccgcggtccgcaagttccggcagggttaccgatgactgaagagcagctcaaaaaactgggtggccgtcagctgcgagcactaggcaagttaatgccgggcgaagaagaggtggctgagaaccctcgtgcccgtagttcagttctgcgtattgcagagaggacgaatgcatgatcagcagagtgacagaagctctaagcaaagttaaaggatcgatgggaagccacgagcgccatgcattgcctggtgttatcggtgacgatcttttgcgatttgggaagctgccactctgcctgttcatttgcattattttgacggcggtgactgtggtaaccacggcgcaccatacccgtttactgaccgctcagcgcgaacaactggtgctggagcgagatgctttagacattgaatggcgcaacctgatccttgaagagaatgcgctcggcgaccatagccgggtggaaaggatcgccacggaaaagctgcaaatgcagcatgttgatccgtcacaagaaaatatcgtagtgcaaaaataaggataaacgcgacgcatgaaagcagcggcgaaaacgcagaaaccaaaacgtcaggaagaacatgccaactttatcagttggcgttttgcgttgttatgcggctgtattctcctggcgctggcttttctgctcggacgcgtagcgtggttacaagttatctccccggatatgctggtgaaagagggcgacatgcgttctcttcgcgttcagcaagtttccacctcccgcggcatgattactgaccgttctggtcgcccgttagcggtgagcgtgccggtaaaagcgatttgggctgacccgaaagaagtgcatgacgctggcggtatcagcgtcggtgaccgctggaaggcgctggctaacgcgctcaatattccgctggatcagctttcagcccgcattaacgccaacccgaaagggcgctttatttatctggcgcgtcaggtgaaccctgacatggcggactacatcaaaaaactgaaactgccggggattcatctgcgtgaagagtctcgccgttactatccgtccggcgaagtgactgctcacctcatcggctttactaacgtcgatagtcaagggattgagggcgttgagaagagtttcgataaatggcttaccgggcagccgggtgagcgcattgtgcgtaaagaccgctatggtcgcgtaattgaagatatttcttctactgacagccaggcagcgcacaacctggcgctgagtattgatgaacgcctgcaggcgctggtttatcgcgaactgaacaacgcggtggcctttaacaaggctgaatctggtagcgccgtgctggtggatgtcaacaccggtgaagtgctggcgatggctaacagcccgtcatacaaccctaacaatctgagcggcacgccgaaagaggcgatgcgtaaccgtaccatcaccgacgtgtttgaaccgggctcaacggttaaaccgatggtggtaatgaccgcgttgcaacgtggcgtggtgcgggaaaactcggtactcaataccattccttatcgaattaacggccacgaaatcaaagacgtggcacgctacagcgaattaaccctgaccggggtattacagaagtcgagtaacgtcggtgtttccaagctggcgttagcgatgccgtcctcagcgttagtagatacttactcacgttttggactgggaaaagcgaccaatttggggttggtcggagaacgcagtggcttatatcctcaaaaacaacggtggtctgacatagagagggccaccttctctttcggctacgggctaatggtaacaccattacagttagcgcgagtctacgcaactatcggcagctacggcatttatcgcccactgtcgattaccaaagttgaccccccggttcccggtgaacgtgtcttcccggaatccattgtccgcactgtggtgcatatgatggaaagcgtggcgctaccaggcggcggcggcgtgaaggcggcgattaaaggctatcgtatcgccattaaaaccggtaccgcgaaaaaggtcgggccggacggtcgctacatcaataaatatattgcttataccgcaggcgttgcgcctgcgagtcagccgcgcttcgcgctggttgttgttatcaacgatccgcaggcgggtaaatactacggcggcgccgtttccgcgccggtctttggtgccatcatgggcggcgtattgcgtaccatgaacatcgagccggatgcgctgacaacgggcgataaaaatgaatttgtgattaatcaaggcgaggggacaggtggcagatcgtaatttgcgcgaccttcttgctccgtgggtgccagacgcaccttcgcgagcactgcgagagatgacactcgacagccgtgtggctgcggcgggcgatctctttgtagctgtagtaggtcatcaggcggacgggcgtcgatatatcccgcaggcgatagcgcaaggtgtggctgccattattgcagaggcgaaagatgaggcgaccgatggtgaaatccgtgaaatgcacggcgtaccggtcatctatctcagccagctcaacgagcgtttatctgcactggcgggccgcttttaccatgaaccctctgacaatttacgtctcgtgggcgtaacgggcaccaacggcaaaaccacgactacccagctgttggcgcagtggagccaactgcttggcgaaatcagcgcggtaatgggcaccgttggtaacggcctgctggggaaagtgatcccgacagaaaatacaaccggttcggcagtcgatgttcagcatgagctggcggggctggtggatcagggcgcgacgttttgcgcaatggaagtttcctcccacgggctggtacagcaccgtgtggcggcattgaaatttgcggcgtcggtctttaccaacttaagccgcgatcaccttgattatcatggtgatatggaacactacgaagccgcgaaatggctgctttattctgagcatcattgcggtcaggcgattattaacgccgacgatgaagtgggccgccgctggctggcaaaactgccggacgcggttgcggtatcaatggaagatcatattaatccgaactgtcacggacgctggttgaaagcgaccgaagtgaactatcacgacagcggtgcgacgattcgctttagctcaagttggggcgatggcgaaattgaaagccatctgatgggcgcttttaacgtcagcaacctgctgctcgcgctggcgacactgttggcactcggctatccactggctgatctgctgaaaaccgccgcgcgtctgcaaccggtttgcggacgtatggaagtgttcactgcgccaggcaaaccgacggtggtggtggattacgcgcatacgccggatgcactggaaaaagccttacaggcggcgcgtctgcactgtgcgggcaagctgtggtgtgtctttggctgtggtggcgatcgcgataaaggtaagcgtccactgatgggcgcaattgccgaagagtttgctgacgtggcggtggtgacggacgataacccgcgtaccgaagaaccgcgtgccatcatcaacgatattctggcgggaatgttagatgccggacatgccaaagtgatggaaggccgtgctgaagcggtgacttgcgccgttatgcaggctaaagagaatgatgtggtactggtcgcgggcaaaggccatgaagattaccagattgttggcaatcagcgtctggactactccgatcgcgtcacggtggcgcgtctgctgggggtgattgcatgattagcgtaacccttagccaacttaccgacattctcaacggtgaactgcaaggtgcagatatcacccttgatgctgtaaccactgatacccgaaaactgacgccgggctgcctgtttgttgccctgaaaggcgaacgttttgatgcccacgattttgccgaccaggcgaaagctggcggcgcaggcgcactactggttagccgtccgctggacatcgacctgccgcagttaatcgtcaaggatacgcgtctggcgtttggtgaactggctgcatgggttcgccagcaagttccggcgcgcgtggttgctctgacggggtcctccggcaaaacctccgttaaagagatgacggcggcgattttaagccagtgcggcaacacgctttatacggcaggcaatctcaacaacgacatcggtgtaccgatgacgctgttgcgcttaacgccggaatacgattacgcagttattgaacttggcgcgaaccatcagggcgaaatagcctggactgtgagtctgactcgcccggaagctgcgctggtcaacaacctggcagcggcgcatctggaaggttttggctcgcttgcgggtgtcgcgaaagcgaaaggtgaaatctttagcggcctgccggaaaacggtatcgccattatgaacgccgacaacaacgactggctgaactggcagagcgtaattggctcacgcaaagtgtggcgtttctcacccaatgccgccaacagcgatttcaccgccaccaatatccatgtgacctcgcacggtacggaatttaccctacaaaccccaaccggtagcgtcgatgttctgctgccgttgccggggcgtcacaatattgcgaatgcgctggcagccgctgcgctctccatgtccgtgggcgcaacgcttgatgctatcaaagcggggctggcaaatctgaaagctgttccaggccgtctgttccccatccaactggcagaaaaccagttgctgctcgacgactcctacaacgccaatgtcggttcaatgactgcagcagtccaggtactggctgaaatgccgggctaccgcgtgctggtggtgggcgatatggcggaactgggcgctgaaagcgaagcctgccatgtacaggtgggcgaggcggcaaaagctgctggtattgaccgcgtgttaagcgtgggtaaacaaagccatgctatcagcaccgccagcggcgttggcgaacattttgctgataaaactgcgttaattacgcgtcttaaattactgattgctgagcaacaggtaattacgattttagttaagggttcacgtagtgccgccatggaagaggtagtacgcgctttacaggagaatgggacatgttagtttggctggccgaacatttggtcaaatattattccggctttaacgtcttttcctatctgacgtttcgcgccatcgtcagcctgctgaccgcgctgttcatctcattgtggatgggcccgcgtatgattgctcatttgcaaaaactttcctttggtcaggtggtgcgtaacgacggtcctgaatcacacttcagcaagcgcggtacgccgaccatgggcgggattatgatcctgacggcgattgtgatctccgtactgctgtgggcttacccgtccaatccgtacgtctggtgcgtgttggtggtgctggtaggttacggtgttattggctttgttgatgattatcgcaaagtggtgcgtaaagacaccaaagggttgatcgctcgttggaagtatttctggatgtcggtcattgcgctgggtgtcgccttcgccctgtaccttgccggcaaagacacgcccgcaacgcagctggtggtcccattctttaaagatgtgatgccgcagctggggctgttctacattctgctggcttacttcgtcattgtgggtactggcaacgcggtaaacctgaccgatggtctcgacggcctggcaattatgccgaccgtatttgtcgccggtggttttgcgctggtggcgtgggcgaccggcaatatgaactttgccagctacttgcatataccgtatctgcgacacgccggggaactggttattgtctgtaccgcgatagtcggggcaggactgggcttcctgtggtttaacacctatccggcgcaggtctttatgggcgatgtaggttcgctggcgttaggtggtgcgttaggcattatcgccgtactgctacgtcaggaattcctgctggtgattatggggggcgtgttcgtggtagaaacgctttctgtcatcctgcaggtcggctcctttaaactgcgcggacaacgtattttccgcatggcaccgattcatcaccactatgaactgaaaggctggccggaaccgcgcgtcattgtgcgtttctggattatttcgctgatgctggttctgattggtctggcaacgctgaaggtacgttaatcatggctgattatcagggtaaaaatgtcgtcattatcggcctgggcctcaccgggctttcctgcgtggactttttcctcgctcgcggtgtgacgccgcgcgttatggatacgcgtatgacaccgcctggcctggataaattacccgaagccgtagaacgccacacgggcagtctgaatgatgaatggctgatggcggcagatctgattgtcgccagtcccggtattgcactggcgcatccatccttaagcgctgccgctgatgccggaatcgaaatcgttggcgatatcgagctgttctgtcgcgaagcacaagcaccgattgtggcgattaccggttctaacggcaaaagcacggtcaccacgctagtgggtgaaatggcgaaagcggcgggggttaacgttggtgtgggtggcaatattggcctgcctgcgttgatgctactggatgatgagtgtgaactgtacgtgctggaactgtcgagcttccagctggaaaccacctccagcttacaggcggtagcagcgaccattctgaacgtgactgaagatcatatggatcgctatccgtttggtttacaacagtatcgtgcagcaaaactgcgcatttacgaaaacgcgaaagtttgcgtggttaatgctgatgatgccttaacaatgccgattcgcggtgcggatgaacgctgcgtcagctttggcgtcaacatgggtgactatcacctgaatcatcagcagggcgaaacctggctgcgggttaaaggcgagaaagtgctgaatgtgaaagagatgaaactttccgggcagcataactacaccaatgcgctggcggcgctggcgctggcagatgctgcagggttaccgcgtgccagcagcctgaaagcgttaaccacattcactggtctgccgcatcgctttgaagttgtgctggagcataacggcgtacgttggattaacgattcgaaagcgaccaacgtcggcagtacggaagcggcgctgaatggcctgcacgtagacggcacactgcatttgttgctgggtggcgatggtaaatcggcggactttagcccactggcgcgttacctgaatggcgataacgtacgtctgtattgtttcggtcgtgacggcgcgcagctggcggcgctacgcccggaagtggcagaacaaaccgaaactatggaacaggcgatgcgcttgctggctccgcgtgttcagccgggcgatatggttctgctctccccagcctgtgccagccttgatcagttcaagaactttgaacaacgaggcaatgagtttgcccgtctggcgaaggagttaggttgatgcgtttatctctccctcgcctgaaaatgccgcgcctgccaggattcagtatcctggtctggatctccacggcgctaaagggctgggtgatgggctcgcgggaaaaagataccgacagcctgatcatgtacgatcgcaccttactgtggctgaccttcggcctcgcggcgattggctttatcatggtgacctcggcgtcaatgcccatagggcaacgcttaaccaacgatccgttcttcttcgcgaagcgtgatggtgtctatctgattttggcgtttattctggcgatcattacgctgcgtctgccgatggagttctggcaacgctacagtgccacgatgctgctcggatctatcatcctgctgatgatcgtcctggtagtgggtagctcggttaaaggggcatcgcgttggatcgatctcggtttgctgcgtatccagcctgcggagctgacaaaactgtcgctgttttgctatatcgccaactatctggtgcgtaaaggcgacgaagtacgtaataacctgcgcggcttcctgaaaccgatgggcgtgattctggtgttggcagtgttactgctggcacagccagaccttggtacggtggtggtgttgtttgtgactacgctggcgatgttgttcctggcgggagcgaaattgtggcagttcattgccattatcggtatgggcatttcagcggttgtgttgctgatactcgccgaaccgtaccgtatccgccgtgttaccgcattctggaacccgtgggaagatccctttggcagcggctatcagttaacgcaatcgctgatggcgtttggtcgcggcgaactttgggggcaaggtttaggtaactcggtacaaaaactggagtatctgccggaagcgcacactgactttattttcgccattatcggcgaagaactggggtatgtcggtgtggtgctggcacttttaatggtattcttcgtcgcttttcgcgcgatgtcgattggccgtaaagcattagaaattgaccaccgtttttccggttttctcgcctgttctattggcatctggtttagcttccaggcgctggttaacgtaggcgcggcggcggggatgttaccgaccaaaggtctgacattgccgctgatcagttacggtggttcgagcttactgattatgtcgacagccatcatgatgctgttgcgtattgattatgaaacgcgtctggagaaagcgcaggcgtttgtacgaggttcacgatgagtggtcaaggaaagcgattaatggtgatggcaggcggaaccggtggacatgtattcccgggactggcggttgcgcaccatctaatggctcagggttggcaagttcgctggctggggactgccgaccgtatggaagcggacttagtgccaaaacatggcatcgaaattgatttcattcgtatctctggtctgcgtggaaaaggtataaaagcactgatagctgccccgctgcgtatcttcaacgcctggcgtcaggcgcgggcgattatgaaagcgtacaaacctgacgtggtgctcggtatgggaggctacgtgtcaggtccaggtggtctggccgcgtggtcgttaggcattccggttgtacttcatgaacaaaacggtattgcgggcttaaccaataaatggctggcgaagattgccaccaaagtgatgcaggcgtttccaggtgctttccctaatgcggaagtagtgggtaacccggtgcgtaccgatgtgttggcgctgccgttgccgcagcaacgtttggctggacgtgaaggtccggttcgtgtgctggtagtgggtggttctcagggcgcacgcattcttaaccagacaatgccgcaggttgctgcgaaactgggtgattcagtcactatctggcatcagagcggcaaaggttcgcaacaatccgttgaacaggcgtatgccgaagcggggcaaccgcagcataaagtgacggaatttattgatgatatggcggcggcgtatgcgtgggcggatgtcgtcgtttgccgctccggtgcgttaacggtgagtgaaatcgccgcggcaggactaccggcgttgtttgtgccgtttcaacataaagaccgccagcaatactggaatgcgctaccgctggaaaaagcgggcgcagccaaaattatcgagcagccacagcttagcgtggatgctgtcgccaacaccctggccgggtggtcgcgagaaaccttattaaccatggcagaacgcgcccgcgctgcatccattccggatgccaccgagcgagtggcaaatgaagtgagccgggttgcccgggcgtaattgtagcgatgccttttgcatcgtatgaatttaagaagttaatggcgtaaagaatgaatacacaacaattggcaaaactgcgttccatcgtgcccgaaatgcgtcgcgttcggcacatacattttgtcggcattggtggtgccggtatgggcggtattgccgaagttctggccaatgaaggttatcagatcagtggttccgatttagcgccaaatccggtcacgcagcagttaatgaatctgggtgcgacgatttatttcaaccatcgcccggaaaacgtacgtgatgccagcgtggtcgttgtttccagcgcgatttctgccgataacccggaaattgtcgccgctcatgaagcgcgtattccggtgatccgtcgtgccgaaatgctggctgagttaatgcgttttcgtcatggcatcgccattgccggaacgcacggcaaaacgacaaccaccgcgatggtttccagcatctacgcagaagcggggctcgacccaaccttcgttaacggcgggctggtaaaagcggcgggggttcatgcgcgtttggggcatggtcggtacctgattgccgaagcagatgagagtgatgcatcgttcctgcatctgcaaccgatggtggcgattgtcaccaatatcgaagccgaccacatggatacctaccagggcgactttgagaatttaaaacagacttttattaattttctgcacaacctgccgttttacggtcgtgcggtgatgtgtgttgatgatccggtgatccgcgaattgttaccgcgagtggggcgtcagaccacgacttacggcttcagcgaagatgccgacgtgcgtgtagaagattatcagcagattggcccgcaggggcactttacgctgctgcgccaggacaaagagccgatgcgcgtcaccctgaatgcgccaggtcgtcataacgcgctgaacgccgcagctgcggttgcggttgctacggaagagggcattgacgacgaggctattttgcgggcgcttgaaagcttccaggggactggtcgccgttttgatttcctcggtgaattcccgctggagccagtgaatggtaaaagcggtacggcaatgctggtcgatgactacggccaccacccgacggaagtggacgccaccattaaagcggcgcgcgcaggctggccggataaaaacctggtaatgctgtttcagccgcaccgttttacccgtacgcgcgacctgtatgatgatttcgccaatgtgctgacgcaggttgataccctgttgatgctggaagtgtatccggctggcgaagcgccaattccgggagcggacagccgttcgctgtgtcgcacaattcgtggacgtgggaaaattgatcccattctggtgccggatccggcgcgggtagccgagatgctggcaccggtattaaccggtaacgacctgattctcgttcagggggctggtaatattggaaaaattgcccgttctttagctgaaatcaaactgaagccgcaaactccggaggaagaacaacatgactgataaaatcgcggtcctgttgggtgggacctccgctgagcgggaagtttctctgaattctggcgcagcggtgttagccggactgcgtgaaggcggtattgacgcgtatcctgtcgacccgaaagaagtcgacgtgacgcaactgaagtcgatgggctttcagaaagtgtttatcgcgctacacggtcgcggcggtgaagatggtacgctgcaggggatgctcgagctgatgggcttgccttataccggaagcggagtgatggcatctgcgctttcaatggataaactacgcagcaaacttctatggcaaggtgccggtttaccggtcgcgccgtgggtagcgttaacccgcgcagagtttgaaaaaggcctgagcgataagcagttagcagaaatttctgctctgggtttgccggttatcgttaagccgagccgcgaaggttccagtgtgggaatgtcaaaagtagtagcagaaaatgctctacaagatgcattaagattggcatttcagcacgatgaagaagtattgattgaaaaatggctaagtgggccggagttcacggttgcgatactcggtgaagaaattttaccgtcaatacgtattcaaccgtccggaaccttctatgattatgaggcgaagtatctctctgatgagacacagtatttctgccccgcaggtctggaagcgtcacaagaggccaatttgcaggcattagtgctgaaagcatggacgacgttaggttgcaaaggatggggacgtattgacgttatgctggacagcgatggacagttttatctgctggaagccaatacctcaccgggtatgaccagccacagcctggtgccgatggcggcacgtcaggcaggtatgagcttctcgcagttggtagtacgaattctggaactggcggactaatatgtcgcaggctgctctgaacacgcgaaacagcgaagaagaggtttcttctcgccgcaataatggaacgcgtctggcggggatccttttcctgctgaccgttttaacgacagtgttggtgagcggctgggtcgtgttgggctggatggaagatgcgcaacgcctgccgctctcaaagctggtgttgaccggtgaacgccattacacacgtaatgacgatatccggcagtcgatcctggcattgggtgagccgggtacctttatgacccaggatgtcaacatcatccagacgcaaatagaacaacgcctgccgtggattaagcaggtgagcgtcagaaagcagtggcctgatgaattgaagattcatctggttgaatatgtgccgattgcgcggtggaatgatcaacatatggtagacgcggaaggaaataccttcagcgtgccgccagaacgcaccagcaagcaggtgcttccaatgctgtatggcccggaaggcagcgccaatgaagtgttgcagggctatcgcgaaatggggcagatgctggcaaaggacagatttactctgaaggaagcggcgatgaccgcgcggcgttcctggcagttgacgctgaataacgatattaagctcaatcttggccggggcgatacgatgaaacgtttggctcgctttgtagaactttatccggttttacagcagcaggcgcaaaccgatggcaaacggattagctacgttgatttgcgttatgactctggagcggcagtaggctgggcgcccttgccgccagaggaatctactcagcaacaaaatcaggcacaggcagaacaacaatgatcaaggcgacggacagaaaactggtagtaggactggagattggtaccgcgaaggttgccgctttagtaggggaagttctgcccgacggtatggtcaatatcattggcgtgggcagctgcccgtcgcgtggtatggataaaggcggggtgaacgacctcgaatccgtggtcaagtgcgtacaacgcgccattgaccaggcagaattgatggcagattgtcagatctcttcggtatatctggcgctttctggtaagcacatcagctgccagaatgaaattggtatggtgcctatttctgaagaagaagtgacgcaagaagatgtggaaaacgtcgtccataccgcgaaatcggtgcgtgtgcgcgatgagcatcgtgtgctgcatgtgatcccgcaagagtatgcgattgactatcaggaagggatcaagaatccggtaggactttcgggcgtgcggatgcaggcaaaagtgcacctgatcacatgtcacaacgatatggcgaaaaacatcgtcaaagcggttgaacgttgtgggctgaaagttgaccaactgatatttgccggactggcatcaagttattcggtattgacggaagatgaacgtgaactgggtgtctgcgtcgtcgatatcggtggtggtacaatggatatcgccgtttataccggtggggcattgcgccacactaaggtaattccttatgctggcaatgtcgtgaccagtgatatcgcttacgcctttggcacgccgccaagcgacgccgaagcgattaaagttcgccacggttgtgcgctgggttccatcgttggaaaagatgagagcgtggaagtgccgagcgtaggtggtcgtccgccacggagtctgcaacgtcagacactggcagaggtgatcgagccgcgctataccgagctgctcaacctggtcaacgaagagatattgcagttgcaggaaaagcttcgccaacaaggggttaaacatcacctggcggcaggcattgtattaaccggtggcgcagcgcagatcgaaggtcttgcagcctgtgctcagcgcgtgtttcatacgcaagtgcgtatcggcgcgccgctgaacattaccggtttaacggattatgctcaggagccgtattattcgacggcggtgggattgcttcactatgggaaagagtcacatcttaacggtgaagctgaagtagaaaaacgtgttacagcatcagttggctcgtggatcaagcgactcaatagttggctgcgaaaagagttttaatttttatgaggccgacgatgattacggcctcaggcgacaggcacaaatcggagagaaactatgtttgaaccaatggaacttaccaatgacgcggtgattaaagtcatcggcgtcggcggcggcggcggtaatgctgttgaacacatggtgcgcgagcgcattgaaggtgttgaattcttcgcggtaaataccgatgcacaagcgctgcgtaaaacagcggttggacagacgattcaaatcggtagcggtatcaccaaaggactgggcgctggcgctaatccagaagttggccgcaatgcggctgatgaggatcgcgatgcattgcgtgcggcgctggaaggtgcagacatggtctttattgctgcgggtatgggtggtggtaccggtacaggtgcagcaccagtcgtcgctgaagtggcaaaagatttgggtatcctgaccgttgctgtcgtcactaagcctttcaactttgaaggcaagaagcgtatggcattcgcggagcaggggatcactgaactgtccaagcatgtggactctctgatcactatcccgaacgacaaactgctgaaagttctgggccgcggtatctccctgctggatgcgtttggcgcagcgaacgatgtactgaaaggcgctgtgcaaggtatcgctgaactgattactcgtccgggtttgatgaacgtggactttgcagacgtacgcaccgtaatgtctgagatgggctacgcaatgatgggttctggcgtggcgagcggtgaagaccgtgcggaagaagctgctgaaatggctatctcttctccgctgctggaagatatcgacctgtctggcgcgcgcggcgtgctggttaacatcacggcgggcttcgacctgcgtctggatgagttcgaaacggtaggtaacaccatccgtgcatttgcttccgacaacgcgactgtggttatcggtacttctcttgacccggatatgaatgacgagctgcgcgtaaccgttgttgcgacaggtatcggcatggacaaacgtcctgaaatcactctggtgaccaataagcaggttcagcagccagtgatggatcgctaccagcagcatgggatggctccgctgacccaggagcagaagccggttgctaaagtcgtgaatgacaatgcgccgcaaactgcgaaagagccggattatctggatatcccagcattcctgcgtaagcaagctgattaagaattgactggaatttgggtttcgaggctctttgtgctaaactggcccgccgaatgtatagtacacttcggttggataggtaatttggcgagataatacgatgatcaaacaaaggacacttaaacgtatcgttcaggcgacgggtgtcggtttacataccggcaagaaagtcaccctgacgttacgccctgcgccggccaacaccggggtcatctatcgtcgcaccgacttgaatccaccggtagatttcccggccgatgccaaatctgtgcgtgataccatgctctgtacgtgtctggtcaacgagcatgatgtacggatttcaaccgtagagcacctcaatgctgctctcgcgggcttgggcatcgataacattgttatcgaagttaacgcgccggaaatcccgatcatggacggcagcgccgctccgtttgtatacctgctgcttgacgccggtatcgacgagttgaactgcgccaaaaaatttgttcgcatcaaagagactgttcgtgtcgaagatggcgataagtgggctgaatttaagccgtacaatggtttttcgctggatttcaccatcgattttaaccatccggctattgattccagcaaccagcgctatgcgatgaacttctccgctgatgcgtttatgcgccagatcagccgtgcgcgtacgttcggtttcatgcgtgatatcgaatatctgcagtcccgtggtttgtgcctgggcggcagcttcgattgtgccatcgttgttgacgattatcgcgtactgaacgaagacggcctgcgttttgaagacgaatttgtgcgtcacaaaatgctcgatgcgatcggtgacttgttcatgtgtggtcacaatattattggtgcatttaccgcttataaatccggtcatgcactgaataacaaactgctgcaggctgtcctggcgaaacaggaagcctgggaatatgtgaccttccaggacgacgcagaactgccgttggccttcaaagcgccttcagctgtactggcataacgacatttatactgtcgtataaaattcgactggcaaatctggcactctctccggccaggtgaaccagtcgtttttttttgaattttataagagctataaaaaacggtgcgaacgctgttttcttaagcacttttccgcacaacttatcttcattcgtgctgtggactgcaggctttaatgataagatttgtgcgctaaatacgtttgaatatgatcgggatggcaataacgtgagtggaatactgacgcgctggcgacagtttggtaaacgctacttctggccgcatctcttattagggatggttgcggcgagtttaggtttgcctgcgctcagcaacgccgccgaaccaaacgcgcccgcaaaagcgacaacccgcaaccacgagccttcagccaaagttaactttggtcaattggccttgctggaagcgaacacacgccgcccgaattcgaactattccgttgattactggcatcaacatgccattcgcacggtaatccgtcatctttctttcgcaatggcaccgcaaacactgcccgttgctgaagaatctttgcctcttcaggcgcaacatcttgcattactggatacgctcagcgcgctgctgacccaggaaggcacgccgtctgaaaagggttatcgcattgattatgcgcattttaccccacaagcaaaattcagcacgcccgtctggataagccaggcgcaaggcatccgtgctggccctcaacgcctcacctaacaacaataaacctttacttcattttattaactccgcaacgcggggcgtttgagattttattatgctaatcaaattgttaactaaagttttcggtagtcgtaacgatcgcaccctgcgccggatgcgcaaagtggtcaacatcatcaatgccatggaaccggagatggaaaaactctccgacgaagaactgaaagggaaaaccgcagagtttcgtgcacgtctggaaaaaggcgaagtgctggaaaatctgatcccggaagctttcgccgtggtacgtgaggcaagtaagcgcgtctttggtatgcgtcacttcgacgttcagttactcggcggtatggttcttaacgaacgctgcatcgccgaaatgcgtaccggtgaaggaaaaaccctgaccgcaacgctgcctgcttacctgaacgcactaaccggtaaaggcgtgcacgtagttaccgtcaacgactacctggcgcaacgtgacgccgaaaacaaccgtccgctgtttgaattccttggcctgactgtcggtatcaacctgccgggcatgccagcaccggcaaagcgcgaagcttacgcagctgacatcacttacggtacgaacaacgaatacggctttgactacctgcgcgacaacatggcgttcagccctgaagaacgtgtacagcgtaaactgcactatgcgctggtggacgaagtggactccatcctgatcgatgaagcgcgtacaccgctgatcatttccggcccggcagaagacagctcggaaatgtataaacgcgtgaataaaattattccgcacctgatccgtcaggaaaaagaagactccgaaaccttccagggcgaaggccacttctcggtggacgaaaaatctcgccaggtgaacctgaccgaacgtggtctggtgctgattgaagaactgctggtgaaagagggcatcatggatgaaggggagtctctgtactctccggccaacatcatgctgatgcaccacgtaacggcggcgctgcgcgctcatgcgctgtttacccgtgacgtcgactacatcgttaaagatggtgaagttatcatcgttgacgaacacaccggtcgtaccatgcagggccgtcgctggtccgatggtctgcaccaggctgtggaagcgaaagaaggtgtgcagatccagaacgaaaaccaaacgctggcttcgatcaccttccagaactacttccgtctgtatgaaaaactggcggggatgaccggtactgctgataccgaagctttcgaatttagctcaatctacaagctggataccgtcgttgttccgaccaaccgtccaatgattcgtaaagatctgccggacctggtctacatgactgaagcggaaaaaattcaggcgatcattgaagatatcaaagaacgtactgcgaaaggccagccggtgctggtgggtactatctccatcgaaaaatcggagctggtgtcaaacgaactgaccaaagccggtattaagcacaacgtcctgaacgccaaattccacgccaacgaagcggcgattgttgctcaggcaggttatccggctgcggtgactatcgcgaccaatatggcgggtcgtggtacagatattgtgctcggtggtagctggcaggcagaagttgccgcgctggaaaatccgaccgcagagcaaattgaaaaaattaaagccgactggcaggtacgtcacgatgcggtactggaagcaggtggcctgcatatcatcggtaccgagcgtcacgaatcccgtcgtatcgataaccagttgcgcggtcgttctggtcgtcagggggatgctggttcttcccgtttctacctgtcgatggaagatgcgctgatgcgtatttttgcttccgaccgagtatccggcatgatgcgtaaactgggtatgaagccaggcgaagccattgaacacccgtgggtgactaaagcgattgccaacgcccagcgtaaagttgaaagccgtaacttcgacattcgtaagcaactgctggaatatgatgacgtggctaacgatcagcgtcgcgccatttactcccagcgtaacgaactgttggatgtcagcgatgtgagcgaaaccattaacagcattcgtgaagatgtgttcaaagcgaccattgatgcctacattccaccacagtcgctggaagaaatgtgggatattccggggctgcaggaacgtctgaagaacgatttcgacctcgatttgccaattgccgagtggctggataaagaaccagaactgcatgaagagacgctgcgtgagcgcattctggcgcagtccatcgaagtgtatcagcgtaaagaagaagtggttggtgctgagatgatgcgtcacttcgagaaaggcgtcatgctgcaaacgcttgactccctgtggaaagagcacctggcagcgatggactatctgcgtcagggtatccacctgcgtggctacgcacagaaagatccgaagcaggaatacaaacgtgaatcgttctccatgtttgcagcgatgctggagtcgttgaaatatgaagttatcagtacgctgagcaaagttcaggtacgtatgcctgaagaggttgaggagctggaacaacagcgtcgtatggaagccgagcgtttagcgcaaatgcagcagcttagccatcaggatgacgactctgcagccgcagctgcactggcggcgcaaaccggagagcgcaaagtaggacgtaacgatccttgcccgtgcggttctggtaaaaaatacaagcagtgccatggccgcctgcaataaaagctaactgttgaagtaaaaggcgcaggattctgcgccttttttataggtttaagacaatgaaaaagctgcaaattgcggtaggtattattcgcaacgagaacaatgaaatctttataacgcgtcgcgcagcagatgcgcacatggcgaataaactggagtttcccggcggtaaaattgaaatgggtgaaacgccggaacaggcggtggtgcgtgaacttcaggaagaagtcgggattaccccccaacatttttcgctatttgaaaaactggaatatgaattcccggacaggcatataacactgtggttttggctggtcgaacgctgggaaggggagccgtggggtaaagaagggcaacccggtgagtggatgtcgctggtcggtcttaatgccgatgattttccgccagccaatgaaccggtaattgcgaagcttaaacgtctgtaggtcagataaggcgttttcgccgcatccgacattcgcacacgatgcctgatgcgacgctggcgcgtcttatcaggcctaaagggatttctaactcattgataaatttgtttttgtaggtcggataaggcgttcacgccgcatccgacatttgcacaagatgcctgatgcgacgctgtccgcgtcttatcaggcctacgtgcggcatcagacaaatgtcactgctttggttcttcgctccagtcatcgctttcggaaagatcgccactgctggggattcgtttttcttcagcagcccattctccgaggtcgatcagctgacaacgtttggagcaaaatggccgaaacgggctgatttcaccccacaccaccgttttcccgcaggttgggcaattcaccgtaatagtttctgacatttttactccttagcaacaggccagttcgaaatccagacgttccggtacctgtccgttttcagtgtccagcggcataaaacgaatggcaaaacggctcttatgtccggaaatttgcggataaagctgtgaatcgagcgacagattcaggcgcagcaagtcggcatcgccaccgttatcctgataaaaaccattcaggctggtttgtttacggaagggggccgactggcgaattaaatccagcaccatggtaagtgcctgggtgagcgggttcaggctggcaatccaggtttctacctggctgtcgcgctgcgcctggggtagatgcagccaaatgtgcaatgtaggtaaatcaaagctgcaacagccgcctgggatgctcagtcgctgacgcaccagagcaatcaaacgatcttcacgcagaaattgcccgatacgcggcgcggaaattaatacgctccccgccgcttttaactgctgaattaatgcttcaatacggctctggtccacgccaggcacgccaatccaggtctggagtttacgttgctgccggtcaagttctttcaacagctcagtgcggacttcgccgcgctcgaaaacatccagtaattcactgacattacggaagaaatgcagcgcgccagcgtggtcaacgatgggtaaattaacggtgagttgctgaatcaaaaactcaatgcgcagccatgtacgcattttttcatttagtggatgttcaaaaaggacctgggtctgcattacggtttttcctgtgagacaaactgcgacgcaagctgcaaatagtgtgcgtgcaggcgggcaacatccgatgcgatagcatccggtgcgccgttattatcaatgacgtcatctgccacggcaaggcgggcttcgcgcgttgcctgagcagcaaggatttgttcgacatgctcgcgagttacatcatcgcgctgcatggtgcgcttaagttgcgtttctgggctgacatccaccacaagcactcgattcgcttttttatacagtgagttttctaccagcaatggcacaacccacagtacatagggggaagtagcttgctggatctggtgttgcgtctcttgctgaatcagcggatgcagcagggcgttaagccagtttttctcttccgggttggcgaagatccgctcgcgcaaggcccggcgctgcaatgttccatcagcagcaatcatgttagcgccaaagtgatcagcaatggcatgtagcgcaggtgcacctggttcaaccacctgacgcgcaataatatcggcatcaatgacgttaattccgagatcagcaaacgcattggcaacggtactcttgccactgccaatgcctcccgttaaggcaactatatacctcataatttatattcccgggaattcatcatgattatcaaaacgttaaaaatgagtgcacgaaagcgaaattgatgaaacgttcgctcactatttaccaggtaaatttatgggattgtagcgtaaaaaaagacaatttcgcagtcttgcgccgcattgattagtgcgtatgatagcgtcactggagttgcgctcttacccttatagccattaaccccaggaatccgcacatgcgtattgaagaagatctgaagttaggttttaaagacgttctcatccgccctaaacgctccactcttaaaagccgttccgatgttgaactggaacgtcaattcaccttcaaacattcaggtcagagctggtccggcgtgccgattatcgccgcaaatatggacaccgtaggcacattttctatggcctctgcgctggcttcttttgatattttgactgctgtgcataaacactattctgtcgaagagtggcaagcgtttatcaacaattcttccgctgatgtgctgaaacatgtgatggtttctaccggtacgtctgatgcggatttcgaaaaaactaaacagattctcgacctgaacccggcattaaacttcgtttgtattgacgtggcgaatggttattccgaacacttcgtgcagttcgttgcgaaagcgcgtgaagcgtggccgaccaaaaccatttgtgctggtaacgtagtgactggtgaaatgtgtgaggagcttatcctctcaggtgccgatatcgttaaagttggcattggcccaggttctgtttgtacaactcgcgtcaaaacaggcgtcggttatccgcaactttctgcggtaatcgaatgtgccgatgctgcgcacggtctgggcggaatgatcgtcagcgatggtggctgcaccacgccgggcgatgtggcgaaagcctttggcggcggtgccgatttcgtcatgcttggcggcatgctggcgggccacgaagagagcggcggtcgcatcgttgaggagaacggcgagaaatttatgctgttctacggcatgagctccgagtctgcgatgaaacgtcacgttggcggcgttgcggaatatcgcgcagcagaaggtaaaaccgttaagctgccgctgcgaggcccggttgaaaataccgcgcgagatattttgggcggcctgcgttcagcttgtacatacgttggggcttcacgcctgaaagagctgaccaagcgcaccacgtttattcgtgtgcaggaacaagaaaaccgcatcttcaacaacctgtaatctcccaacgctggcgtggagcaacacgccagcgttatcccatcccactcatcgcatcgcctaaatggaaaattggcagatacattgccaccaccagcgtaccaataattcctcccgttatgatcagcaacgccggttccagtaaggctgcgaggttatccgccagcgccattgtgttttcccgatgatgatgggcgaggttgtctaacatgagatccagagagccggatgcctctcctgttctcactaattgcaaacagagcgggctaaactcaccggtattttttagcgccagccagatgggttgaccgttactgatatcgtgctggatttgtgtcagaagttgcacccagtacgggcagcgcattgtttctctgacgctctctacgccctgtaaaaaagtaatgcctgcactttgtgtcagcgccagaatcgtaaagatctgcgtgagtttttgtccccgcatcagtgaacccataatcgggatgcgtaacagcaatttctgccgcactataagccaggtcggtcggcgcatcagcaacttattggctatcgccagcagaaagccgaacaacaccagcagccagctccattcgccactaaagtctgccagcgtcatgatcccctgcgttagtgccggtagtggggtgttgaaggtcttatagatagcggcaaactccggcagaacaaaatgcagcattgccacaaccaccatgattgccatcgctaaaatgatgatgggataacgtaacgctgatttcactttgtcggtcaactgacgctgggctttttgctgacgcgccagttcaaagcagcattcatccagcttaccggtcagttcacccgtgcggatcatcgcctgatagagcggcggaaatacctctgaccagggtaataaggcattggaaaaagcaatgccctgttcgagatcgtgcgccagcgattgcagcaacgcttgccattgcttactgggatgctgttccgccagcagagccagcccttcagaaagcgttaaccctgctttgagtagcgtcgccagttgatgaatgacttccgcgcttttatctcctcgccactgcgcagaattgatggcgattcgcttcaggcttagtggggtaaccatctgttgctgtagtgccataagcagtaaagtacggctctctgcccatagcatcccatcttgcgcattgccgtcgccggttatgccatgccagcgccagagttgcttactcgccatgcggcatccccagtacgcggattaactcttcaaaggtggttaagccttgctctacggccaggcagccgttttcaaaaagcgtacgcatacccgcctgtcgtgcgtgcgtttccagcgattcaacgtcggtattagcggaaataagctgacgaatgaccggcgttatgggcagaacttcaaataaggccgtacgaccataaaaaccgtggtagcaatgtacacaaccgggtgcctgccagtggggcagcggcgatggccatacattgtctggaatgtggatgggctccccttgctgccggcgacaatgtgggcaaagtttgcgtaccagacgctgggctattaccagcgtaagcgccgatgatagcatccagcgggcgacccccatttgctgtaaacgtaccagcgtttcgcaggtggaattagtgtgtagggtagacaacaccaggtgaccagtttgcgccgctttaatagcgatctctgctgtttcgccatcgcggatctctccgatcatgatgacgtcaggatcctggcgcaataacgcacgcaaaacgccctgaaaggtgagtccggcacgcggatggatttgcgtctggtttagtccggctatggggatctcaactggatcttcgacgctacaaatattaatgtcagcggtattcagcttttgcagggcactataaagcgtgaccgttttgccgctgccggtagggccagttaccagcaccagtccctgtggttgttgcaaggcatgagcaaagtccgccagttgtaacggctgcattccaagcgtgttgacatccagtgcctgacccacctgctgtaacaaccttaataccaccttttcaccaccccgacatggtaaggtcgcaatacgaaatgagacggcgtttcctgccagttcgacagtgaattgcccgtcctgcggcaggcgatgttccgcaatatccaggtttcccagcacttttaatctggcggttaatgcgactccggcatccggtgaaacatccggtaaaggatgcaatacgccgtcgatacgcaagcggatgcggtaggcattgtccgctggttcgatatgaatatcagacgcgcgttgttccagcgcagattgtaacgttcgagttagcaactctgctttgggctgatgcttctcctgaacagctacgggcaatgtctgttgtgtgcgactggcgtgaccttccatttgttggcgcgtccagcaggtgatctcaatacgtttggtggtagcgaaatgcaatgcgtccagtagctcatgcgaaggtgcatcgactaccgcaacatgaaccacctcttcgctggcatccagcaagactccatgataacgcagacacagggcagtgagctgtggaatattcattgccgctccttagttggcgtcatcaaagcggaagacatcttcgcaggcttgctgcaatgcgctgtcactttgaatattgcagttgcgcgtccagccggtgacgccgtttgcgttatcccaacccggtgtcatgacgacgcttagcccattgagactttcttgcccggtcagcgacaccacgccctttgccacactcatggctgaaacatagcgggtggtggtaggcgagggaatgccattgctgccaccgtcgcaggtatctaatccaccatgttccagcgcgcacaactctacggcggtacggtaaggcacaaaggtttgtagcatgtcggtgagtgcggctttgcgcaggtagttttgataagcgggaataccaatggcgcttaaaatggcaatgatgccaataaccaccatcagttcgataagtgtaaaaccgcgttgcttgtccatctgtttcgctccttgatttggttggcgctactttggcaaacgccatcagcacaggcgaggggcaaaaaacgaaacgggaaagcagattccgaggttttttatttcgttgcagcgaaagacaagaaatttgcgaggcgttacgaagaaagttggggaaggggagattatccgcccgcgatggagcggataaatctgtcaactattagcgaaaacgcattgaaaggtcgagtgcttgtacgtgtttagttagcgcaccgacggagataaagtccacgcccgtttcggcaaattcacgcagtgttttgtcagtgacgttgccagacacttccagtagcgccttgccgttggtgcgtttgacggcttcgcgcatctgttctgtttcgaagttatccagcatgatgatatcggctcctgctttcagggcttcatcaagttcttccagattctctacttcgacttctactggcgcatccgggtgcagccaggacgctttttcgaccgcctggcgcactgagccggaggcaataatatggttttctttgatcaggaaggcatcagaaagccccagacggtgattcgctccgccgccgcaaagtaccgcgtatttcagagctgaacgcaggccgggtaaggttttgcgcgtatccaacaactgcgtgttggtgccttccagcaattcgacatagtggcgtaccttactggcaactcctgaaagggtttgcacaaaattaagcgcagtgcgttcgcccgttaacagcacgcgggatgggccttcaagttcgaacaaggattgattggcattgatgacatcgccgtcatccacatgccagattatggtgacatcgtcgcctgccagttgaataaacacctcttcaacccagcgtttgccgcaaaagacgccattctcgcgggtgatcaccgtggcatgagagcgagaattttccggtaaaagttttgccgtaatatcattgttggcatcgactgttccgcctaaatcttcccgcagcgcctgggccaccgcgccggggatatcgagattaatgcgttccagcagctcgtcacgtcgggtgtcagggttatagcggcgaggcggcatgttaaaactccagatagctaacgaatcataaggtagaaacatgctactctgaaccgggtattagcaccacatataaggagatcctgcatgttgttagaacaggggtggctggttggcgcgcgccgcgttccctcaccacattacgattgccgcccggatgacgaaacacccaccctgctggtggtgcacaatattagcctgccgccaggcgagtttggcggtccgtggatcgacgcattattcactggaactattgatccgcaggcacatcctttctttgctgagatcgcccatttgcgcgtctccgctcactgtttgattcgccgtgatggtgaaatagtccagtatgttcctttcgataaacgtgcatggcatgcgggagtctctcagtatcaggggcgcgaacgctgcaatgatttttctattgggattgagcttgaaggcaccgatacgctggcgtataccgatgcgcagtatcaacagcttgcggcggttacgcgggcactgattgattgctatccggatatcgctaaaaacatgacgggccattgtgatattgcgccggatcggaaaaccgatcccggtcctgcatttgattgggcacggtttcgtgtgctggtcagcaaggagacaacatgacgctatttacaaccttactggtgttaattttcgagcgcctgtttaagttgggcgagcactggcagcttgatcatcgtcttgaagcgttctttcggcgggtgaaacatttttctctcgggcgcacgttaggcatgaccattattgcgatgggcgtgacttttttactgttacgcgcattgcagggagtattgttcaacgttcccacgctactggtgtggctgctgattggtttgctgtgtattggcgcaggtaaagttcgtcttcattatcatgcttatctgacagctgcttcacgtaatgatagccatgcccgtgccacgatggctggcgaactcaccatgattcacggcgtcccggcaggctgcgacgaacgtgagtatttgcgtgagctgcaaaatgcattgctgtggattaactttcgtttttatcttgcaccgctgttctggctgattgtggggggaacctggggacccgttacgctgatggggtatgcgtttttgcgtgcatggcaatactggctggcgcgatatcagacgccgcatcatcgtttacagtccggcattgatgccgtgcttcatgtactggattgggtgccggttcgtcttgcgggtgtggtatatgccttgatcggtcatggtgagaaagcgttaccggcctggtttgcttcgctgggtgatttccatacttcgcagtatcaggtgttaacgcgtctggcgcagttctctctggcgcgtgaaccgcatgtcgataaggtggagacgccgaaggcagcggtttcaatggcgaagaaaacctcgttcgtggtcgtggtggtgattgcactactgacgatttacggggcgttggtgtaaagattattgccctcaccctgtacgggtgagggcgtagagagattaatgcgcttttacggctttggcggttttctctttaaacagatagccgatacctaacacgatcagccataccgggatcaggtataccgaaatcgccattcctggggtcatcagcataatcaccagtaccgccgccataaacagcaggcagatccagttacccagcggataaagcagagcagggaagcgagttaccacgccttgttcctgcttggcgcgacggaatttcatatgcgccaggctaatcatcgcccagttgattaccagtgcagataccaccagcgccattaacagtccgaaagcggactctggggcaaggtagttaatcagtacgcacaacgccgttaccagtgcagacaccagaatggtatttactggtacaccacgtttatcgacagacgccagcgcttttggcgcattaccctgttgtgccagaccaaacagcatacggctgttgcaatatacgcagctgttgtacacggagagcgccgcagtcagtaccacgatgttcagcgcattcgccacaaaggtatcgcctaactcgtggaagatcagcacaaacggactggtatcggcggtaacgcgggtccacggcatcagtgagagcagaacggctaacgaaccaatatagaaaatcaggatgcggtagataacctggttagttgctttcggtatactttgctccgggttatcagcttctgctgcggtgatccccaccagttccagaccaccgaacgagaacatgataatcgccatcatcatcaccagcccggtgaagccgtgcggcaggaaaccaccctgatcccacaggttgctaacggtcgcctgcgggccgccgttgccactgaatagcagccagccgccgaagatgatcatcgctaccaccgcgataactttgataatggcaaaccagaactccatctcgccaaacactttaacgttggtcaggttgatggcgttaatcaccacaaagaatacggcggcagaaacccaggtggggatttccggataccagaactgaatgtatttacccacggcagtcagctcagccatggcaactaaaacgtacagtacccagtagttccagccagaggcgaaaccggcaaaactgccccagtatttataagcaaagtggctaaaggagcctgcgacaggttcttcgaccaccatttcacccagctgacgcatgatcagaaaggcgataaaaccagcaatggcgtaacccaggataatccctggccctgcggactgtattacggaggcgctacccaggaataacccggtccctatcgcgccacccagcgcgataagctgaatatggcggtttttaaggccgcgctttagctgctcgccgtgctgttgaccttccatcatgaaacctcgtgcggtggttgtttttttgatctacgcagtgatgcgtgtgtaagtttgcaattccgtttgttgtattaatttgtttacatcaaagaagtttgaattgttacaaaaagacttccgtcagatcaagaataatggtatgcggcagcgaatgcacccgctttatgcatggttgaagatgagttgcttaaaaagaaaccgtttgtaaagctcagcctcaacccctctcaatatgtagaatgaatttaaattcgttttaattgaattaaaaatcacaaaattggtaagtgaatcggttcaattcggatttttatagtttaataatcgttaaaaaactcctttcctacgtaaagtctacatttgtgcatagttacaactttgaaacgttatatatgtcaagttgttaaaatgtgcacagtttcatgatttcaatcaaaacctgtatggacataaggtgaatactttgttactttagcgtcacagacatgaaattggtaagaccaattgacttcggcaagtggcttaagacaggaactcatggcctacagcaaaatccgccaaccaaaactctccgatgtgattgagcagcaactggagtttttgatcctcgaaggcactctccgcccgggcgaaaaactcccaccggaacgcgaactggcaaaacagtttgacgtctcccgtccctccttgcgtgaggcgattcaacgtctcgaagcgaagggcttgttgcttcgtcgccagggtggcggcacttttgtccagagcagcctatggcaaagcttcagcgatccgctggtggagctgctctccgaccatcctgagtcacagtatgacttgctcgaaacacgacacgccctggaaggtatcgccgcttattacgccgcgctgcgtagtaccgatgaagacaaggaacgcatccgtgaactccaccacgccatagagctggcgcagcagtctggcgatctggacgcggaatcaaacgccgtactccagtatcagattgccgtcaccgaagcggcccacaatgtggttctgcttcatctgctaaggtgtatggagccgatgttggcccagaatgtccgccagaacttcgaattgctctattcgcgtcgcgagatgctgccgctggtgagtagtcaccgcacccgcatatttgaagcgattatggccggtaagccggaagaagcgcgcgaagcatcgcatcgccatctggcctttatcgaagaaattttgctcgacagaagtcgtgaagagagccgccgtgagcgttctctgcgtcgtctggagcaacgaaagaattagtgatttttctggtaaaaattatccagaagatgttgtaaatcaagcgcatataaaagcgcggcaactaaacgtagaacctgtcttattgagctttccggcgagagttcaatgggacaggttccagaaaactcaacgttattagatagataaggaataacccatgtcagaacgtttcccaaatgacgtggatccgatcgaaactcgcgactggctccaggcgatcgaatcggtcatccgtgaagaaggtgttgagcgtgctcagtatctgatcgaccaactgcttgctgaagcccgcaaaggcggtgtaaacgtagccgcaggcacaggtatcagcaactacatcaacaccatccccgttgaagaacaaccggagtatccgggtaatctggaactggaacgccgtattcgttcagctatccgctggaacgccatcatgacggtgctgcgtgcgtcgaaaaaagacctcgaactgggcggccatatggcgtccttccagtcttccgcaaccatttatgatgtgtgctttaaccacttcttccgtgcacgcaacgagcaggatggcggcgacctggtttacttccagggccacatctccccgggcgtgtacgctcgtgctttcctggaaggtcgtctgactcaggagcagctggataacttccgtcaggaagttcacggcaatggcctctcttcctatccgcacccgaaactgatgccggaattctggcagttcccgaccgtatctatgggtctgggtccgattggtgctatttaccaggctaaattcctgaaatatctggaacaccgtggcctgaaagatacctctaaacaaaccgtttacgcgttcctcggtgacggtgaaatggacgaaccggaatccaaaggtgcgatcaccatcgctacccgtgaaaaactggataacctggtcttcgttatcaactgtaacctgcagcgtcttgacggcccggtcaccggtaacggcaagatcatcaacgaactggaaggcatcttcgaaggtgctggctggaacgtgatcaaagtgatgtggggtagccgttgggatgaactgctgcgtaaggataccagcggtaaactgatccagctgatgaacgaaaccgttgacggcgactaccagaccttcaaatcgaaagatggtgcgtacgttcgtgaacacttcttcggtaaatatcctgaaaccgcagcactggttgcagactggactgacgagcagatctgggcactgaaccgtggtggtcacgatccgaagaaaatctacgctgcattcaagaaagcgcaggaaaccaaaggcaaagcgacagtaatccttgctcataccattaaaggttacggcatgggcgacgcggctgaaggtaaaaacatcgcgcaccaggttaagaaaatgaacatggacggtgtgcgtcatatccgcgaccgtttcaatgtgccggtgtctgatgcagatatcgaaaaactgccgtacatcaccttcccggaaggttctgaagagcatacctatctgcacgctcagcgtcagaaactgcacggttatctgccaagccgtcagccgaacttcaccgagaagcttgagctgccgagcctgcaagacttcggcgcgctgttggaagagcagagcaaagagatctctaccactatcgctttcgttcgtgctctgaacgtgatgctgaagaacaagtcgatcaaagatcgtctggtaccgatcatcgccgacgaagcgcgtactttcggtatggaaggtctgttccgtcagattggtatttacagcccgaacggtcagcagtacaccccgcaggaccgcgagcaggttgcttactataaagaagacgagaaaggtcagattctgcaggaagggatcaacgagctgggcgcaggttgttcctggctggcagcggcgacctcttacagcaccaacaatctgccgatgatcccgttctacatctattactcgatgttcggcttccagcgtattggcgatctgtgctgggcggctggcgaccagcaagcgcgtggcttcctgatcggcggtacttccggtcgtaccaccctgaacggcgaaggtctgcagcacgaagatggtcacagccacattcagtcgctgactatcccgaactgtatctcttacgacccggcttacgcttacgaagttgctgtcatcatgcatgacggtctggagcgtatgtacggtgaaaaacaagagaacgtttactactacatcactacgctgaacgaaaactaccacatgccggcaatgccggaaggtgctgaggaaggtatccgtaaaggtatctacaaactcgaaactattgaaggtagcaaaggtaaagttcagctgctcggctccggttctatcctgcgtcacgtccgtgaagcagctgagatcctggcgaaagattacggcgtaggttctgacgtttatagcgtgacctccttcaccgagctggcgcgtgatggtcaggattgtgaacgctggaacatgctgcacccgctggaaactccgcgcgttccgtatatcgctcaggtgatgaacgacgctccggcagtggcatctaccgactatatgaaactgttcgctgagcaggtccgtacttacgtaccggctgacgactaccgcgtactgggtactgatggcttcggtcgttccgacagccgtgagaacctgcgtcaccacttcgaagttgatgcttcttatgtcgtggttgcggcgctgggcgaactggctaaacgtggcgaaatcgataagaaagtggttgctgacgcaatcgccaaattcaacatcgatgcagataaagttaacccgcgtctggcgtaagaggtaaaagaataatggctatcgaaatcaaagtaccggacatcggggctgatgaagttgaaatcaccgagatcctggtcaaagtgggcgacaaagttgaagccgaacagtcgctgatcaccgtagaaggcgacaaagcctctatggaagttccgtctccgcaggcgggtatcgttaaagagatcaaagtctctgttggcgataaaacccagaccggcgcactgattatgattttcgattccgccgacggtgcagcagacgctgcacctgctcaggcagaagagaagaaagaagcagctccggcagcagcaccagcggctgcggcggcaaaagacgttaacgttccggatatcggcagcgacgaagttgaagtgaccgaaatcctggtgaaagttggcgataaagttgaagctgaacagtcgctgatcaccgtagaaggcgacaaggcttctatggaagttccggctccgtttgctggcaccgtgaaagagatcaaagtgaacgtgggtgacaaagtgtctaccggctcgctgattatggtcttcgaagtcgcgggtgaagcaggcgcggcagctccggccgctaaacaggaagcagctccggcagcggcccctgcaccagcggctggcgtgaaagaagttaacgttccggatatcggcggtgacgaagttgaagtgactgaagtgatggtgaaagtgggcgacaaagttgccgctgaacagtcactgatcaccgtagaaggcgacaaagcttctatggaagttccggcgccgtttgcaggcgtcgtgaaggaactgaaagtcaacgttggcgataaagtgaaaactggctcgctgattatgatcttcgaagttgaaggcgcagcgcctgcggcagctcctgcgaaacaggaagcggcagcgccggcaccggcagcaaaagctgaagccccggcagcagcaccagctgcgaaagcggaaggcaaatctgaatttgctgaaaacgacgcttatgttcacgcgactccgctgatccgccgtctggcacgcgagtttggtgttaaccttgcgaaagtgaagggcactggccgtaaaggtcgtatcctgcgcgaagacgttcaggcttacgtgaaagaagctatcaaacgtgcagaagcagctccggcagcgactggcggtggtatccctggcatgctgccgtggccgaaggtggacttcagcaagtttggtgaaatcgaagaagtggaactgggccgcatccagaaaatctctggtgcgaacctgagccgtaactgggtaatgatcccgcatgttactcacttcgacaaaaccgatatcaccgagttggaagcgttccgtaaacagcagaacgaagaagcggcgaaacgtaagctggatgtgaagatcaccccggttgtcttcatcatgaaagccgttgctgcagctcttgagcagatgcctcgcttcaatagttcgctgtcggaagacggtcagcgtctgaccctgaagaaatacatcaacatcggtgtggcggtggataccccgaacggtctggttgttccggtattcaaagacgtcaacaagaaaggcatcatcgagctgtctcgcgagctgatgactatttctaagaaagcgcgtgacggtaagctgactgcgggcgaaatgcagggcggttgcttcaccatctccagcatcggcggcctgggtactacccacttcgcgccgattgtgaacgcgccggaagtggctatcctcggcgtttccaagtccgcgatggagccggtgtggaatggtaaagagttcgtgccgcgtctgatgctgccgatttctctctccttcgaccaccgcgtgatcgacggtgctgatggtgcccgtttcattaccatcattaacaacacgctgtctgacattcgccgtctggtgatgtaagtaaaagagccggcccaacggccggcttttttctggtaatctcatgaatgtattgaggttattagcgaatagacaaatcggttgccgtttgttgtttaaaaattgttaacaattttgtaaaataccgacggatagaacgacccggtggtggttagggtattacttcacataccctatggatttctgggtgcagcaaggtagcaagcgccagaatccccaggagcttacataagtaagtgactggggtgagggcgtgaagctaacgccgctgcggcctgaaagacgacgggtatgaccgccggagataaatatatagaggtcatgatgagtactgaaatcaaaactcaggtcgtggtacttggggcaggccccgcaggttactccgctgccttccgttgcgctgatttaggtctggaaaccgtaatcgtagaacgttacaacacccttggcggtgtttgcctgaacgtcggctgtatcccttctaaagcactgctgcacgtagcaaaagttatcgaagaagccaaagcgctggctgaacacggtatcgtcttcggcgaaccgaaaaccgatatcgacaagattcgtacctggaaagagaaagtgatcaatcagctgaccggtggtctggctggtatggcgaaaggccgcaaagtcaaagtggtcaacggtctgggtaaattcaccggggctaacaccctggaagttgaaggtgagaacggcaaaaccgtgatcaacttcgacaacgcgatcattgcagcgggttctcgcccgatccaactgccgtttattccgcatgaagatccgcgtatctgggactccactgacgcgctggaactgaaagaagtaccagaacgcctgctggtaatgggtggcggtatcatcggtctggaaatgggcaccgtttaccacgcgctgggttcacagattgacgtggttgaaatgttcgaccaggttatcccggcagctgacaaagacatcgttaaagtcttcaccaagcgtatcagcaagaaattcaacctgatgctggaaaccaaagttaccgccgttgaagcgaaagaagacggcatttatgtgacgatggaaggcaaaaaagcacccgctgaaccgcagcgttacgacgccgtgctggtagcgattggtcgtgtgccgaacggtaaaaacctcgacgcaggcaaagcaggcgtggaagttgacgaccgtggtttcatccgcgttgacaaacagctgcgtaccaacgtaccgcacatctttgctatcggcgatatcgtcggtcaaccgatgctggcacacaaaggtgttcacgaaggtcacgttgccgctgaagttatcgccggtaagaaacactacttcgatccgaaagttatcccgtccatcgcctataccgaaccagaagttgcatgggtgggtctgactgagaaagaagcgaaagagaaaggcatcagctatgaaaccgccaccttcccgtgggctgcttctggtcgtgctatcgcttccgactgcgcagacggtatgaccaagctgattttcgacaaagaatctcaccgtgtgatcggtggtgcgattgtcggtactaacggcggcgagctgctgggtgaaatcggcctggcaatcgaaatgggttgtgatgctgaagacatcgcactgaccatccacgcgcacccgactctgcacgagtctgtgggcctggcggcagaagtgttcgaaggtagcattaccgacctgccgaacccgaaagcgaagaagaagtaatttttcgtttgccggaacatccggcaattaaaaaagcggctaaccacgccgctttttttacgtctgcaatttacctttccagtcttcttgctccacgttcagagagacgttcgcatactgctgaccgttgctcgttattcagcctgacagtatggttactgtcgtttagacgttgtgggcggctctcctgaactttctcccgaaaaacctgacgttgttcaggtgatgccgattgaacacgctggcgggcgttatcacgttgctgttgattcagtgggcgctgctgtactttttccttaaacacctggcgctgctctggtgatgcggactgaatacgctcacgcgctgcgtctcttcgctgctggttctgcgggttagtctgcattttctcgcgaaccgcctggcgctgctcaggcgaggcggactgaatgcgctcacgcgctgcctctcttcgctgctggatcttcgggttagtctgcattctctcgcgaactgcctggcgctgctcaggcgaggcggactgataacgctgacgagcggcgtccttttgttgctgggtcagtggttggcgacggctgaagtcgtggaagtcgtcatagctcccatagtgttcagcttcattaaaccgctgtgccgctgcctgacgttgggtatctcgtgtaatgactggtgcggcgtgtgttcgttgctgaaactgatttgctgccgcctgacgctggctgtcgcgcgttggggcaggtaattgcgtggcgctcattccgccgttgacatcggtttgatgaaaccgctttgccatatcctgatcatgatagggcacaccattacggtagtttggattgtgccgccatgccatattcttatcagtaagatgctcaccggtgatacggttgaaattgttgacgtcgatattgatgttgtcgccgttgtgttgccagccattaccgtcacgatgaccgccatcgtggtgatgataatcatcattgtcatgatgatgatggtcatgatcgtcgtcgtcccagtcgatgctgctgaatagtgcgtacgtggtagcaacgcccatgctatagccgaatccgcgtacaaagctgtcaacaaacggttctccggctggtggtggcagataaaccggcggatacgcagtattggcccagttcccgtaaaccacggttgggttgtagttgggaatatagaccacatcaggattggcgggctcaatggaaatgacggttgttgccggctctgtaatgacggggttggcagttaaaactgtattggatggtatgacgggtgccgtgactgtctgttttaccggtacagctttcttcgttgtggtaataactttctgttcggttgatgacttcagcgagccggtttgttgcgccagttgccgcaatcgctgtaccgagtccatcacgtcctgcggctgggccagaaaagcatcgcccaggttttgcacccattgcgggttttcgcccatcaatgccatcaattgtggaaaggccaccagtgatttaacgctggcgtcccacggctggtcagataccgcctgaatagcagcatcgccttgtttaagtggattatcgtgcgaccattgcactgcttgagcaacgtttgtcggataggttgatgccatcagcacctgcgaaagtagggcgtcgggatacagcgcgacgggcgcgacccattgatctatttgtgcagtgctgaatgcggatttgacgacggcgggtgttacgggaggtgcggaaaccgttgcaggaaacgtaaccgcggcagcgtcagacacagccagttgtgtcgattgcggttccacaggcgcttccactgtgcggctttttatatatagcccggtagaggcggcacaaagcccggcactgcaaattagcgccagcacatggggtttaaacggcaaagtcattttcataattcggatctcaaggaaatcgcaatggtcggcgaactgccacccgcaggtgctgtgaatccgagtataaagaggcggtagtttaaattttgactaatcttgggattcgttgagaaaggtgattatcaccatgcgaattaacgaagtttttacggagggaaacaatctctagaccatccttaacgattcagccacttttttatgttgcttttttgtaaacagattaacacctcgtcaaaatcctgctattctgcccgttgcggtactgggcatttaccctacaaactgctgtctcacaggagcgtgaagagaatcgcctgccgcactatgacaatgagagcgaggagaaccgtcgtgctagaagaataccgtaagcacgtagctgagcgtgccgctgaggggattgcgcccaaacccctggatgcaaaccaaatggccgcacttgtagagctgctgaaaaacccgcccgcgggcgaagaagaattcctgttagatctgttaaccaaccgtgttcccccaggcgtcgatgaagccgcctatgtcaaagcaggcttcctggctgctatcgcgaaaggcgaagccaaatcccctctgctgactccggaaaaagccatcgaactgctgggcaccatgcagggtggttacaacattcatccgctgatcgacgcgctggatgatgccaaactggcacctattgctgccaaagcactttctcacacgctgctgatgttcgataacttctatgacgtagaagagaaagcgaaagcaggcaacgaatatgcgaagcaggttatgcagtcctgggcggatgccgaatggttcctgaatcgcccggcgctggctgaaaaactgaccgttactgtcttcaaagtcactggcgaaactaacaccgatgacctttctccggcaccggatgcgtggtcacgcccggatatcccactgcacgcgctggcgatgctgaaaaacgcccgtgaaggtattgagccagaccagcctggtgttgttggtccgatcaagcaaatcgaagctctgcaacagaaaggtttcccgctggcgtacgtcggtgacgttgtgggtacgggttcttcgcgtaaatccgccactaactccgttctgtggtttatgggcgatgatattccacatgtgccgaacaaacgcggcggtggtttgtgcctcggcggtaaaattgcacccatcttctttaacacgatggaagacgcgggtgcactgccaatcgaagtcgacgtctctaacctgaacatgggcgacgtgattgacgtttacccgtacaaaggtgaagtgcgtaaccacgaaaccggcgaactgctggcgaccttcgaactgaaaaccgacgtgctgattgatgaagtgcgtgctggtggccgtattccgctgattatcgggcgtggcctgaccaccaaagcgcgtgaagcacttggtctgccgcacagtgatgtgttccgtcaggcgaaagatgtcgctgagagcgatcgcggcttctcgctggcgcaaaaaatggtaggccgtgcctgtggcgtgaaaggcattcgtccgggcgcgtactgtgaaccgaaaatgacttctgtaggttcccaggacaccaccggcccgatgacccgtgatgaactgaaagacctggcgtgcctgggcttctcggctgacctggtgatgcagtctttctgccacaccgcggcgtatccgaagccagttgacgtgaacacgcaccacacgctgccggacttcattatgaaccgtggcggtgtgtcgctgcgtccgggtgacggcgtcattcactcctggctgaaccgtatgctgctgccggataccgtcggtaccggtggtgactcccatacccgtttcccgatcggtatctctttcccggcgggttctggtctggtggcgtttgctgccgcaactggcgtaatgccgcttgatatgccggaatccgttctggtgcgcttcaaaggcaaaatgcagccgggcatcaccctgcgcgatctggtacacgctattccgctgtatgcgatcaaacaaggtctgctgaccgttgagaagaaaggcaagaaaaacatcttctctggccgcatcctggaaattgaaggtctgccggatctgaaagttgagcaggcctttgagctaaccgatgcgtccgccgagcgttctgccgctggttgtaccatcaagctgaacaaagaaccgatcatcgaatacctgaactctaacatcgtcctgctgaagtggatgatcgcggaaggttacggcgatcgtcgtaccctggaacgtcgtattcagggcatggaaaaatggctggcgaatcctgagctgctggaagccgatgcagatgcggaatacgcggcagtgatcgacatcgatctggcggatattaaagagccaatcctgtgtgctccgaacgacccggatgacgcgcgtccgctgtctgcggtacagggtgagaagatcgacgaagtgtttatcggttcctgcatgaccaacatcggtcacttccgtgctgcgggtaaactgctggatgcgcataaaggtcagttgccgacccgcctgtgggtggcaccgccaacccgtatggacgccgcacagttgaccgaagaaggctactacagcgtcttcggtaagagtggtgcgcgtatcgagatccctggctgttccctgtgtatgggtaaccaggcgcgtgtggcggacggtgcaacggtggtttccacctctacccgtaacttcccgaaccgtctgggtactggcgcgaatgtcttcctggcttctgcggaactggcggctgttgcggcgctgattggcaaactgccgacgccggaagagtaccagacctacgtggcgcaggtagataaaacagccgttgatacttaccgttatctgaacttcaaccagctttctcagtacaccgagaaagccgatggggtgattttccagactgcggtttaaaaagtcagcgcacgcgctgcgcataaacgacacaatgcccggtgaatgagattcccgggcatttttttatttctaaaccatcgccgttccgctgtttttctccggtaaggctgcgataattacatcaatggcgcaatgcgatttcggtgcattgccgggagcagaggaacacactatggattacgaatttctgcgcgatattaccggagtggtaaaggtgcgtatgtccatggggcatgaagtggtcgggcactggtttaatgaagaggtgaaagaaaacctggccttgcttgatgaagtggaacaagcagcgcacgcactgaaaggtagcgaacggtcctggcaacgggcagggcatgaatacaccctgtggatggacggtgaagaggtgatggttcgcgccaatcaactggaattcgctggcgatgaaatggaagaggggatgaactactacgacgaagaaagcctgtcgctatgcggcgttgaggattttctgcaggtcgtggcggcttaccgcaatttcgtgcagcagaagtaaataaatctggcggagcctgggagctccgccagagccgttaaacagctggcatattgcgcccgtaataaatctcgcgcatttctttccacagcgcagcggtaatttcctggcgctcgctgtcggttaagtcttccggtttggtgtggaacatgtagtgcttaaggtcgaactctttaagcaacatcttggtatggaagatattttcctgatagacgttcacatccaccatgtcatacagcgccttcatatcgtcagacataaagttctgaatcgaattaatctcatggtcgataaagtgcttcataccgttaatgtcgcgggtaaaaccgcgcacgcgataatcaatggttacgatatcggactcaagctggtggatcaggtaattcagcgccttcagcggagaaatcacgccgcaggtagagacttcaatatcggcgcggaaggtacataaaccgccttcaggatgactttccgggtaggtatgtacgcaaatatgacttttatcaagatgggcaacgaccgtttctggcagtgggccggggtgttctgttttgtcgatgagtttcgggtcaaccggttcttcactcaccagaatagtgacgctggcaccctgtggttcgtaatcctggcgggcgatgttaagaatattagccccgataatggaacaggtttctgacaggatttcggtcagacggttggcattatagagttcatcgatataagcaatataaccgtcgcgctcttcggcagttttggcgtagcagatatcgtaaatacaaaaactcagacttttggtcagattattaaagccatgcagtttcagttttttcaatttcttatcttctccttaggacggctgtgaagccagtgcgtcttgcagatactgaggtaaggcaaaagctgccgtatggattgccggattgtaataacggcatttcaggccagaggcgagaaaacgcgcctgaataatttcggttgagagatggcgtaaggcgtcgttatctgtcgcccatgcaaaagtcatgataccgccgtaataggtcgggatcgccgcctgataaaagccaacgtcgctgaagtaatggctgagtttgcgatggctgtcgatggcttcttcctgctgtaaaaagcagacgccgttttgtgcgacgaagataccgccaggattcaggcaacgtttgcagccttcataaaatgccgaagtgaaaaggctttcgccgggaccgataggatcggtgcagtcggagataatgacatcaaaggtctggctggtttgattaacgaaattgacgccatcgtcgatcaccagcttaaagcgcggatcgtcgtagctaccggcgttatggttgggtagatactgacggcagaacgatacgacacccgcatcgatttccaccatcgtgattgactcaacgtttttatgtcgggttacttcacgcagcatggcaccgtcgccgccgccgataatcagcacatgtttcgcgtgaccatgggccagtagcggaacatgggtcatcatctcatgatagataaactcgtcgcgctcggtggtttgtactacgccatccagcgccattacgcgaccaaatgcagcgttctcaaaaatgatcagatcctggtgatcggtcttttcatgatacagaacgttatctaccgcaaagtactgcccaaactggtcgtgtagcgtttcatgccactgttttttttcggccatgggttgatacctcctttgttaacacccgtaaaaaaagggcgcaacataatagctaacattgaccgcggatgcacggtcaatatttctacaaaaaggtatcagggattatttgacgtaggcaagcaggcttaaggaatcgcgggccagggctttgcattttttagcgacgggaatgccaatgccgctgagatcgcggtagctgtcttcaccgagggctttcatgtcgaaggtgtcgtaattactgaggtcccactggttttgctgagcgaaaaagaccagtgcgcgacgaatttgcccgttaggtaagttctggtaaccacaatcgttcttcagaaagacaaaaactgccgttaaatcggccatatcttcggcttcagactcgctgagcgcgtaactgtttgcgcagacggccatcaggctgccgaataacactgttctgaaaaacgtcttcattgcttctaccaggggcttaaagaagataaacgttagcacactgcgagcgaggcgacgaccattattgtcgattaaattgtgtctgcggcttgaccttcccgtaaggggaaggactatgctcaacgtttgattttgtttcgcctgcttaagaataaggaaataactatgcaacgtcgtgatttcttaaaatattccgtcgcgctgggtgtggcttcggctttgccgctgtggagccgcgcagtatttgcggcagaacgcccaacgttaccgatccctgatttgctcacgaccgatgcccgtaatcgcattcagttaactattggcgcaggccagtccacctttggcgggaaaactgcaactacctggggctataacggcaatctgctggggccggcggtgaaattacagcgcggcaaagcggtaacggttgatatctacaaccaactgacggaagagacaacgttgcactggcacgggctggaagtaccgggtgaagtcgacggcggcccgcagggaattattccgccaggtggcaagcgctcggtgacgttgaacgttgatcaacctgccgctacctgctggttccatccgcatcagcacggcaaaaccgggcgacaggtggcgatggggctggctgggctggtggtgattgaagatgacgagatcctgaaattaatgctgccaaaacagtggggtatcgatgatgttccggtgatcgttcaggataagaaatttagcgccgacgggcagattgattatcaactggatgtgatgaccgccgccgtgggctggtttggcgatacgttgctgaccaacggtgcaatctacccgcaacacgctgccccgcgtggttggctgcgcctgcgtttgctcaatggctgtaatgcccgttcgctcaatttcgccaccagcgacaatcgcccgctgtatgtgattgccagcgacggtggtctgctacctgaaccagtgaaggtgagcgaactgccggtgctgatgggcgagcgttttgaagtgctggtggaggttaacgataacaaaccctttgacctggtgacgctgccggtcagccagatggggatggcgattgcgccgtttgataagcctcatccggtaatgcggattcagccgattgctattagtgcctccggtgctttgccagacacattaagtagcctgcctgcgttaccttcgctggaagggctgacggtacgcaagctgcaactctctatggacccgatgctcgatatgatggggatgcagatgctaatggagaaatatggcgatcaggcgatggccgggatggatcacagccagatgatgggccatatggggcacggcaatatgaatcatatgaaccacggcgggaagttcgatttccaccatgccaacaaaatcaacggtcaggcgtttgatatgaacaagccgatgtttgcggcggcgaaagggcaatacgaacgttgggttatctctggcgtgggcgacatgatgctgcatccgttccatatccacggcacgcagttccgtatcttgtcagaaaatggcaaaccgccagcggctcatcgcgcgggctggaaagataccgttaaggtagaaggtaatgtcagcgaagtgctggtgaagtttaatcacgatgcaccgaaagaacatgcttatatggcgcactgccatctgctggagcatgaagatacggggatgatgttagggtttacggtataaaaagaccgtattcggaaatatgcccggatctctccgggcattaaactgatgacaaacgcaaatctgcctgatgcgctacgcttatcaggcctacgctagctgtgcaatccattgattttgcacaattttgtaggctggataaggcgttcacgccgcatccggcatgaacaacgcgcacgttgtcagcaatctgagcaagtcttacttcacatcatccggcagcgcataagccacaatatagtcgcccatcttcgtaccaaatgaaccgtgaccgcctgcggagatcaccacatactgcttaccattcacttcataggtcattggcgtagcctgaccacccgctggtaaacgaccctgccacagtttttcaccgttgctcatgttgtaagcgcgcaggtagttatctgccgtagcggcgataaacagcacgttacccgccgtggagattggcccgcccagcatcggcatacccatattgaacggcaccggaaccggcatcgggaacggcatactgtcctgcggcgtaccaatacgtttcttccacaccacttcattagttttcagatccagcgccgagatataaccccatgctggctgtttacatggcagaccaaatggtgagaggaacgggttgagcgtgacaccatacggtacaccgtactgtggctgaatgccggattccgtacccgtgcctttggcatctttcggctgctccatcgggttgccaggaccacgcgggatcagtttcgaaacaaacggcagtgccattgggttggcaatcgccacttcacgatttggatcaacggaaatcccgccccattcgaacatccccaggttacccgggaagaccagcgtaccctgttcagatggcggggtgaaaatgccttcatagcgcatctggtggaacatcacgcggcacaccagttggtcaaacatggtggctccccacatatccgcaccgctcaaatctttcgtcggacggaagctcagttcagaaaacggttgagttggggttacgtaatcgcctttcgctgcaccttggggaaccggtttttccggtgccggaaccaccagttcgccattacgacgatcgagcacaaaaatgttgccggttttcgccggagcgtaaataactggcactttctgaccattaacggtgatgtccgccagcgtcggctgtgccggaagatccatgtcccacaggtcgtggtgaacggtctggtagctccacgccagtttcccggtagtggcattcagcgccagaatcgagctggcataacgttcctgttccggtgtgcggttaccgccccagatatccggcgtggtcacgcccatcggcagatagaccagatccagcttcgcgtcataggccgctggtgcccaggagtttggcgagttaaaggtaaaggtgtgttcgtcagacgggattgcgttcggatctttcgcgccgggatcaaaagcccacagcagctccccggtgttgacatcaaaaccacggatcacgccagacgtttcgcgggttgagaagttatcggtaactgaaccggccatcacgatggttttatcggtgataatcggtggcgaagtcggttcatacagacccggtttggtgtctggcatattgctttgcagattgagcacgcctttattggcgaaggtttcgcacagtttgccgttttcagcgttaatcgcaatcagtcgaccatcattgaccggaagaatgatacgacgcgggcaatccgccatcacttccggcgaagcggtttctgctttggcttcatgataagagacaccacggcaggttacgtgctggaaagactcgttggttttcagctcaggatcgtaatgccatttctctttgccgctggcggcatcaagcgcaaacaggcgctggtgagcggtacacaggtaaagggtgtcgcccactttaatcggcgtcacttcattggtgatttcacccggatcgttcggctgcttcacatcgccagtacggaacacccaggcttctttcagattatggacgttatcggcgttaatttgtttcagcggcgaaaagcgttgaccttcctgattacgaccataggcaggccagtcctgatcggctacgggggagatagcttcagcaggtgtggcatcggcgcttaaggtgccgttgatctcctgcggatcgttaaatccggcccaggtcaggataccaccgctaatcagcagtgcgaccaccagtgcggcaactgcgccgctggcaggaatgaccaggcgacgccagacaaacggcaggatcagccagatgccgaagaagaccagaatgtcgctgcgcggagtcagcgcccagaagtcgaaaccaacttcccagacgccccaaatcatggtgccgagcagcagggctgcgtatagccaaagcgcggcgcgtttactgcgccacagcatccaggcgacgccgagcatcacaaggccagcgatagggtagtaccaggagccgccaatcgcgaccagccagcctccgccaatgagtagatacagcccgcaaagcgctgcaaaaagggctgttagcgtgacgagtaatcgtcgcgagcctgtattgttaattgccataaagagacaccatttcaattcattaatattttagtagcaattaattataggttttaacatgtgtgatcgtcatcacaattcgagctttattaacagattccgcgaatgaatagttttactggtatactgcgtgtcttgcgctttgttgcggtgccaaaacctgcccgtgcgaagtgatttgtttttaaatcatatggttagagatatgaaacatactgtagaagtaatgatccccgaagcggagattaaagcgcgtatcgccgaactgggtcgtcagattactgagcgttacaaagacagcggcagcgatatggtgctggtgggtctgctgcgtggctcatttatgtttatggcggacctgtgccgtgaagttcaggtatctcatgaagtcgactttatgaccgcctccagctacggtagcggcatgtccaccacccgtgatgtgaaaatcctcaaagatctggatgaagatatccgtggcaaggacgtgctgattgttgaagatatcatcgactcggggaatacactgtcgaaagtgcgtgagatcttaagcctgcgcgaaccgaagtcgctggcgatttgtacgctgctggataaaccgtcccgtcgtgaagtgaacgtcccggtagaatttatcggtttctcgatcccggatgagtttgtggtgggttacggcattgattacgcacagcgttaccgtcatctgccgtatatcggcaaagtgattctgctggacgagtaagtgtgaagttgccggatgtgttgcatccggcatggcatttttatttgtggttggcgtgtttcagcttgaggttggaaatcccgtgacggtaacgttgctcaagggtttcgcggttggtggcggtaacatccagatcacgcagcaagccgtcgtgaatgccgtaggcccagccgtgaatggtaactttctgcccgcgtttccacgctgattgcataatggtggagtggcccaggttatacacctgttccatgacgttcagttcacacaaggtatccagacggcgctcttgcggcatttcgccgagcaatgagctatgtttgaaccagatatcgcggatatgcagcagccagttgttgataagccccagttccgggttttcaactgcggcttgtacgccgccgcaaccgtagtggccacagataataatgtgttcaacttcgagtacatccactgcatactgaaccacggaaaggcagttcaggtcagtgtgaatgaccaggttagcaacattacggtgaacaaagagttcgcccggctcaagaccggttaaacgttctgcaggaacgcgactgtcggaacatccaatccatagaaagcgcggtttttgcgcttgtgccagtttctcaaaaaacccgggatcctcttccaccagcatttttgaccatagtgcattgttgctgatgagtgtatctatgtctttcatggaggttaacgacctgtaaccaaataattacgtttggctaatatagggcaactccgggacgatttaaaccacagataaagtgtaagaacgtaaggtaagtaaaaatttatgaccattgcactggaacttcaacagcttaaaaaaacctatccaggcggcgttcaggcgcttcgtgggatagatttgcaggtcgaagcgggtgatttttatgcgcttctcgggccgaacggggccgggaaatcgaccactatcggtattatcagctctctggtaaataaaacctccgggcgggtcagcgtatttggttacgatctcgagaaggatgtcgtgaacgctaaacgtcagttgggactggtgccgcaggaatttaacttcaacccgtttgaaaccgtgcagcaaattgtggtgaatcaggcagggtactacggcgtggagcgcaaagaagcgtacatccgcagcgaaaagtatcttaaacaactcgatctatggggaaaacgcaacgaacgtgcgcgtatgttatctggcgggatgaagcgccgtttaatgattgcccgtgcgttaatgcatgaacctaaactactgattctcgacgaaccgaccgcaggcgtggatattgaacttcgccgctcaatgtggggctttttgaaggatttaaacgacaaaggcaccaccatcattctcaccacacactacctggaagaagcagaaatgctgtgccgcaatatcggcattattcaacacggtgagctggtggaaaatacctcgatgaaggcgctgctggcgaagctgaaatcggaaacctttattctcgatctcgcaccgaaaagcccgttaccgaagctcgatggctatcagtatcgactggtcgataccgcgacgctggaagttgaagtgctgcgtgagcaggggatcaacagcgtatttacgcagttaagtgagcagggcattcaggtattaagtatgcgtaacaaagctaaccgtctggaagagctgtttgtttcactggttaatgaaaaacaaggagatcgcgcatgatgcatctttactgggtggcgctaaaaagcatctgggcgaaagagatccatcgctttatgcgtatctgggtgcagacgctggtgccgccagtcatcaccatgaccctttactttattatcttcggtaacctgattggttcgcgtattggcgatatgcatggcttcagctatatgcagttcatcgtaccggggctgatcatgatgtcggtgatcaccaatgcctacgccaacgttgcgtcatcattttttggtgccaagttccagcgtaatattgaagagctgctggtagcgccggttccgactcacgtcattattgccggatatgtcggcggtggcgtggcgcgtggtctgtttgttggcattctggtgacggcaatttcactgttttttgtgccatttcaggtgcattcgtgggtattcgttgccttaacgctggtgctcacggcggtgttgttctcccttgcgggtttgctgaacggtgtgtttgccaaaacgttcgatgacatcagcctggtgccaacctttgtgttaacgccactcacgtatttgggcggggtcttttactcactgactttgttgccgccgttctggcaagggctgtcgcacctgaacccaatcgtttatatgatcagtggtttccgctacggcttcctcggtatcaatgatgttccgctggtcactacctttggcgtactggtggtctttattgtggcgttttatttgatctgttggtcgctgatccaacgtggacgtggtttgcgtagctaaggctatttcctctcctctggatttgggggagaggagttttgacggctatcaccctttatcaacaatggtcagggtagactgattttcggctaaggaggaaggcgatgttaggttgggtaattacctgtcacgatgaccgggcgcaagagatactggatgcgctggagaaaaaacatggggcacttcttcagtgccgggccgtgaatttctggcgcggattaagctctaatatgctcagccgcatgatgtgcgatgctctgcatgaagcggactctggtgagggtgtcatcttcttaaccgatatagccggagcgccaccgtatcgcgtggcttcattattaagccacaaacactcccgttgcgaagtgatttctggtgtcacgttaccgttaattgaacagatgatggcttgccgtgaaaccatgaccagttcagagtttcgcgagcgtattgtcgaactgggtgcgccggaggtgagtagtctttggcaccaacaacaaaaaaatccgcctttcgtcctcaaacataatttgtatgagtattaacccgcgattctgatggcgcttttgctacaataaaagcgttgtttcaccctcggttattttttcatgtacaaacaagctgttattctcctgctgatgctgtttaccgcaagtgtcagtgccgcgttacctgcccgttatatgcaaaccatcgaaaatgctgcggtctgggcgcaaattggtgacaagatggtgaccgtggggaatattcgggccggacaaatcattgccgtggagcccactgccgcaagttattacgcatttaattttggctttggcaaaggttttatcgataaaggtcatctcgagccggttcaggggcgacaaaaagttgaagacggtttgggcgacctcaacaagccgctgagtaatcagaacttagttacctggaaagatacgccggtctataacgcgccgagtgcgggaagtgcgccatttggggtactggcggacaatttgcgctacccgattttgcataaactgaaagacaggttaaatcaaacctggtatcagatccgtattggcgatcgactggcctatatcagcgcactggatgcccaacccgataatggcctgtcggtgctaacctatcaccatattctgcgcgacgaagaaaacacccgttttcgccatacttcgacgaccacatcggtacgcgctttcaataaccagatggcctggctgcgtgacaggggatacgcgacactgagcatggtgcagctggaaggctacgtgaagaataagatcaatctccctgcgcgagcggtggtgattacctttgatgatggcctcaagtcggtgagccgctatgcgtatcctgtgttgaaacaatatggcatgaaggcgacggcgtttattgttacctcacgcatcaaacgtcacccgcagaagtggaacccaaaatcgctgcaatttatgagcgtttctgagcttaacgaaattcgcgatgtatttgatttccagtcacatacccattttttgcatcgggtagatggttatcgccgacccatattactgagccgtagtgagcacaatattctgtttgattttgcacgttcacgccgcgctctggcgcaatttaatccgcatgtctggtatctttcgtatccgtttggcggatttaatgacaacgccgtgaaggcagcaaacgatgccggatttcacctggcggtgacaaccatgaaaggcaaagtaaaaccgggggataatccgttgttactaaaacgactttatatcttaagaacggattcgctggagacgatgtcgcggctggtgagtaaccagccgcagggataacaatcaagcaacctgtaccggaatcgctttcgcggtacgtttcatttcattgtcgccttcaaaataggcgacgttgggtcgccaggtgcgagcttcttcatctggcatggtaacgaagctggcgatgatgacaatatcgccgacactggcgcagtgggccgccgcaccgttaacagaaataattctcgaaccgcgttctgccgcgatggcataagtggagaaacgcttgccgttggtgacattccagatatcaatggcttcgttttcgagaataccggctgcgtcaagaaaatcctggtcaatggcgcaagaaccttcatagtgcaggtccgcatgagtcactttcacgcggtggagtttgccctgcagcatcgtgcgaatcataacttctacctttctaccctgtcgttaacgaagcaggcgatgcctgctttgaggaaattctcacgcagtattgcccgatttttgtttagtgtctactcatctgacggcatttgcgtcagcagtttgcgtaccgcgccgaagcgtgccatgtatcgcctgtaacgaattgatatttctctgaacgctgctcggtaaacaataaagaggtggctgacgatagcgcgccttgactggatactgccttcacgcaaagccacacggaagacagggaagatggatgcaccgagtaccacaccgcatgacgcggtatttaaacaatttttaatgcatgcggagacggctcgcgactttctggagatacatttgccagtggaattacgcgaactttgtgacctcaacacgcttcatttagagtcggggagtttcattgaagagagcctgaaaggacacagcacggacgtgctctattccgtgcaaatgcagggcaatcccggttatctgcatgttgtgattgaacaccaaagcaagccggataagaaaatggcctttcgcatgatgcgttattctatagccgccatgcaccggcatctggaggctgaccacgataagctgccgctggtggtgccgatactgttttatcagggcgaggccacaccttatccgctatcaatgtgctggtttgatatgttttactcgccggagctggcgcgacgcgtctataacagtcctttcccgctggtggatatcaccatcacaccggatgacgaaatcatgcaacatcggcggattgcgattctcgaactactgcaaaaacatattcgccagcgcgacttaatgttattgcttgagcaactggtcacgctgatcgacgaagggtacactagcggaagtcagttagttgccatgcaaaactatatgctgcaacgcggtcatactgaacaagcggatttgttttacggtgtgttgagagacagggaaacgggaggggagtctatgatgacgctggcgcagtggtttgaagagaaagggattgagaaggggattcagcagggaagacaggaagtaagtcaggaattcgcccagcgtcttctgagtaaaggaatgtctcgggaagacgttgcagagatggcaaatttacctcttgctgagattgataaggtaattaaccttatttaagttacctgtgttatgacagatgacgtggggtaaattaataactggcgccatcagccgtagcgccagttaagtattacgccagctcgaccattttgttgtcgatcaggcgagcatcgccaagccaggcggctaccagaattactgcccgtttgctggtttcagaaacttccagcaatgtgtcggcatcgcgaatctgaatatcatcggcgcggaagcctttttcattcagttcttgccccgcaatggtaataatttcatcgagatcccgttccccagcctgcaatttgtcagcaatcgaacttaaaactttgtacagaccaggcgcaattttgcgttgttccgccgtcagataaccgttacgggaacttagcgccagaccgtctttggcgcgcataattggcacaccgacaatctcaatatcgaagcccatatcggcaaccattttgcggatcagcgccagttgctgaaaatctttttcaccgaagcaggcgatgtccggctggaccaggttgaacagcttgctgacaatagtcgaaacgccgcgaaaatgtcccggacggctggcaccttccagcatggtcgaaaggccaggaacgtcaacgtaagtgtgggtttcagtaccgttcgggtagatctcttttaccgaaggggcgaaaactaaatccactttacgtttgtttagcttctcgcagtcctcctgcaaggtccgtggataacgagccagatcttccgggcggtcgaactgcatcgggttaacgaaaatactgacgacgaccacatcggcgcgggctttggcttcgtcgaccagcttcatatggccatcgtgcaggttacccatggtaggcaccagcgccacgcgcttgccttccatacgcaggcggcgaatttgctgacgcagcagcggcagggtttcgataattaacacaacgtgactccttaatggaaactgtgttcttcgcccggataaacgccggactccacttcagccatatactgccgcacagccgcgcggatgtcgcccgtttcggcgaggaaatttttagcgaatttaggaatgtgaccgccggtaataccaaaggcgtcgtgcatcacgaggatctgcccgtcagtgacgttgcctgcgccaatgccaataaccgggatcgccagtgcttcggtaatacgttttgccagttcaaccggcacgcattccagcaccagcagctgtgccccagcagcttctaaggctaatgcatcgctgagcagttgatcgcccgcttcatcgccgcgcccctgaactttgtagccaccgaaaatattcactgactgtggtgttaaacctaagtgaccacatacaggaacggcacgttcggtcagcatttgtacggtttctaccagccactcaccgccttcaattttgaccatgttagcaccggcacgcataaccgttgcggcgttttcgaaggcttgttccggcgtggcatacgccataaacggcaggtcagccagcagcaggcagtttggtgcgccgcgacgtacggcggcagtgtggtaggcgatatcggcaacggtaactggcagggtggagtcgtgcccctgaaccgtcatgcccagcgaatcgcccaccagcatgacgttaagcccttcatcagcaaagagtttggcgaagctatagtcataagcggtgatggtcgcgaaacgttttttttcctgtttgtacttctgcagtaaggagatggtggtcggtttcataacgtatcctgataaattgatgttgtgctgtctggcattttatcagtcacattggtgggggcaatgatttatccgtagcagcactgccagaaggtgacagtgctgctacgttatcagggataggttacctggaaagtactggtggctttaaattcgccgggttcgatagcaatattcccgtcttgctttaatgttgcctggaaatgaagaggctgtgatgtgccgttaccttgattagggtaaaccccatcggaggtgtcatcttcggtttcataatctatataaacagaattcgtatcattaggttttaatgtcattagcggatttttactggttgctaaaccttcaatgagtacgccaacgcctttggcggcagtgcttccagtaagcgtattaccaagcagttgtgtgttttgagtacctacttttccagtgacgagttttgtttcaatattacgcacacgaatacaattctgaagcgagatatcaaagggaacaggtgaagcgccatttttaattgtcccagagctatattctcccattctaaccgttgaaccattgactgatggcccggtaagtatggaggtaaaacatgttggtaaggttaatttgacattattcagtgtgaaattgacataaatgtggttgctgtgatctacaacttttgtaccaggactgtaggccttaaacgaataaaggtaatttgatgaactggataactggacttgctgattaagtgtaggatcgaaattagtatctgtataaaattcaacagttatgttgtgtactataccaccaatagcccaaaacttatcgtagtcgtctgctttgttgcaacccttagtttgtagatcgctgtctgtgacggaaaagaaaaattcttggttggaaggatctccgatatagattcctggcgattgaatgtcagttattgtatcgtatgcagaccagacccttgatattaacatggtgtaatacagaccaggaacagatgtattaaatagtttatgtccgccataatctttacctgaatagaccatggcattttcaatagttattggaccaggattcgctctgccagatgtattgcagtaaagaataccaccaccggtacctgtatccaggtatgaccagtacatttttaccccagtcgggccgagctgcgtgggtttataaaaaaccaagttgcttgctgttgatgtgtaattaaaggtcatctgtgcggcagtggaggggcctcgatagttatcaactcctgcattatttcccacaataaaacttgtatatgcactgactgtattacaacaagaatacagtgctaaaaaaagaatgtacctgaagatagtcttcatttttactccaatgtttctttattgttatggtttgcgctgtttttgtttgttattcgtagtaaatatccactaacacatggctcataagttgaccagatgtaacactcaatgcaggatcgattttttgcattcgggtgctaaatttccaggatgaaccattcatgtcatccgacattactggataaacggaacgagatccgcctgaagcattaagaacattgaatgtattcgccgaatcctgagtagaaaatataactactcctacattacttgctcctgacgaaatttcattagcaaatatttgcctagagccagcagccatgacaccgctaagggctctaaaatcaatatgtaactgatttagcacatcgccagttccctgtaatgcacagtcggatacagtgatagtgaactcttttccacctggttgataactttcaggagtaacattacctgaaaaatatcccaccccaacgacgccaagatcaatattaccctggttactgattccgcttttgcaggtgctgttttttacattggcaacaaggtcaatatcctgtccagcaatggctggacaggcgatgcaaaacagtaatgacagaaacagaattattctcttcatcagcttacgttgagtgggatgcatatatagttcctgaatctgtaagtctgttagttataggttactgtaaatgtggctggtgcagaaaacttacccgcagtgacattgtttacggttttatttttttccacgaccaggcgtgcactcatcggataataaacgaccgcattggctgcagtggagattgttacctcttgtgatgctggtgttacacagctaaattgtgttgcactccctgttgccggagttacagtgctccagacttcaacggcgacagcacttgctttatctgcggctgtggaaccatttgcaaaccccgcaccgtcattagcagttccctcgcatgtggctcgcttggttaattttatttgcgcttttttattggggatacccgcacagtctttgaatttgagtttgaatgtttttactttggtcttggcattgatttcagaaatatatacatcaccaaaatcaacaacagaaatgtcctgatcagagtcatttactaatgtagcggtacaagtacccatttctacagtagtaataacggtcagtccaatactgtctgttgccgcataagagagtacgctgaacaatgaggcagccaaaacgacactgctggataatccataacgtaaatttttaaatgtcatcataattatccttcttattgatagatgaaattaaacgtcgccagtgcacgaaaattccccggtacgccttgccctgcatctgtttcacgtagcgcaacggtcatttcaagacccttatcgggctgcatctcgtctgtgctccagcgtatcttttccgcactgttaggtttaaggaaagtggcatcatcagtagtccgttttttgaaacccataccgatattacttgtcgtcgaagatgaatcaccagactgcggtataataagcttaggtgagcttgatgatgcatttccggtcagagtggtatcaatccaactgatgccactgctgcacccactggcaaccagtttaaaatcagcctgagattctgtcgttttattcgcgatcttatccagacccatcttagggattctcaatgtgtagttattattgccatcattcgtgacgttattaccagtaagtgtgatgttacaggttgtcgctttgacagtggctgtaaactctacattaatatccgttgcaaatactgagggtgataataatattcccatcagtatcactattttatgtggcgttgtttttatcatttgacgtcccttgtagttactgaatctgacaccgaattccattcagaataatagattgtgctattttttctgcttctgggctttgttgataatgcgcaagacaacttacgggtttactttgttcgagccatttaatgctgatatttccctgctgctcaataccacgaacaaatgcttgtccaccctgtccaacattaccaatgacattgccttgctcatcataaatatctgcagcaaatggaatatttttaccatcacttcgtgtgatgttcataatggctgattgcccttgcacggtttcaaaatcagcaaagacgactgaaccctgacgcggtacagctactgcactggtactttttaattcaacatcgttctcaagatcgttgatatccagcgcgatacggttttcatgataaggagaaagagcgctggtgacaccataaccccatcgatcgatagtactgttgccataatttattcgcgctccttgagcacctggagcctgaactaccgccagtgtatcggagtcgctaaaactatcattactgaaagtcagtccaccgctatgcaatacaaaaccaccgtcggtgctgagagaaacttgacggctgttatcgctatttgcagaaattgaacctgccagcgttccccatggtgactcatagctggcataacccccaacataactcaaatctttgctggctttattcatcgtatagccagtattcacgctataactgacgcgagcgttatcgctatagccactgctgctaacgttgagttggttattacccttaaagtcactgcttatttgagtatcaatactctggaaacctgaagtacgttgttcagtgccaagtaatttttcaattggaatggtgaaactaagataaacgctatcgtcagtgtcgccgtcttcattccatgaacgctgggcactgacactgtagctgccccaggatgtactgttactgtagccaatagagtaattgctacgattttgtccggaagcccagtaatcggaccaacttccggaaagataaaatgaaccgtaatcttttttctcaaatttcaacggttggttaatactgaccgtaacctgatttttcatgcgtgagtaattacgcatggatttcggttcaagatcttgttcgggatgtttcacttcatcaattagagttagtgcatcattaagaccaaggtaattctgtgtcgaatagcgataggccgcgatattcagtgaagtacttgtttcttcgaataacttgttccaggaaacacgataactttgcccctggtatgttttatcatccgggatacgaacattggaatgagtcacatcgaaagaaaatgcaccaactgaagtattcagaccaagacctaacaaaccagcggtatagttattatcggttatctgaataccggtataacccgtcagatagttattcaggccgtagtagtagcttgcttgaaataaattaggctcatcctgaatatcatcttttaagacctgaccgccgctaatatcccaacgtccaacgccagggcgtaacatttgaacaacggatgagaaaggttgcgagaatgtccgctttgagccatcggattcttcgatggtaacaataagatcgctgccgtaccctgacggactcagatcatcaatgacgaaagcgcctggcggcaccgtcgtttcataaatcttatagccaccttgcgtaatagtgactttggcgttggtattggcaacgccatgaatgataggcgcaaagctggctaaagtcggaggcaacatgcggctgtcactgtataaacgaatgcctcggatactgacggaatcaaaggtttcgcccgtcgtataagactcaccaagaatgagttgagaacgcagcgaggcgatatcacgctgaacataccgattcttaaaatcataattactgccagaatcggtcatccagttgtagttgcccgaggcacgcagtcgccatgcacctaaattcatcccaccgttaaatgcagcataaatgctttcattttttcgaccaggggtttcactatgatatccgttgaggttgtatgacaacatggccgcattaatgccgttttcccataacgatggatcaacatagttttggtaatttttcattacccaggcttgaggaacgtctatatccagacgttgatcgttaacgtcataacgaacagaagcctgagggataatttccgtcaaattgaggcaattgccgagcgtttcatccctggcaagcagaacggctttttcgttatttatatcgggagaattaatatgaaactgcaataaattctttaatgtgatacaagcctgggcgttcttttttccttcaattgcgacaaatgtaatactttggttaatgattggttggtcgtttacataaacactgacgtcgtaaacacccggtatagcggggttaccttcactgtaccggctgagatcaatattagatgcattctgccccatcaggaaggtatggtcatattcaacgagttcagcactgaaagcagtattgcaatacagcagcgcgcaaaacgtggcgatacgggtcagatgatgataatttttagtatattctatagtcacgctatgcttcctgcggaattatatccttgcctgattacagcctggcattaccttcaattgcgccaccaaagtcattaatggcgtaaaaatgcacttttgcagaattcgctttgccattaaggccattgactttcatgacctcatcactaaatggtgcaatcattttcacatcaatcggatagcgtttaccgctagcttctaaatcaccactgctaaaagagacgtagtaaggggttggattggtcactcgtaatgacgccttaccttctgaacctgaccagaaccacttcagggctaacggggcttcagagggatttcccttcaatccatccgggcgatagaaaagttttatacgtgtgcgaaatgccagttgcagcaggctttgattcgcgaccttttctgcatctggttttggtggaacttccagtacgttaaaccagaacacgctctctctgtctttaggcagtgaggtgctggctgtgtacattaatttgattgtttgcccacgtttggcatcaatacgcgatactggcggcgtagcagtaaaagggactgtaatactgccaggctcagcgttgtcatcgccagtatctaaccaactctggacaagcaacgggttattccctttattttccagacgtacgttgacacttttttgatcgcttttatatattacgcgagtacccgaaatgacaatgtccgcaatagacgatgaactaaaagccatacaggttacgaagcataaagctgttgtatgtttggtgttaaaaaacataaaccatccctgatagagttaattaaaacagggaataatataaaatagaaattattattccctgtatattcattcaatcaatttaactggtgaatacttactgataagtaatggtgtatgcagtgttagtttttacataaccagcagttgctgtttggtctgcgacggcacgaacgtaagacgctttaaaatcataaacagcagattttgtcgttgcatccagggctttagtatacacatcgccagggttgttaatttgaacctgtttgatagtggaaccatcaatattgtgtagagcgatattaacgccgtcagatgggttgttaatagacatgtcgttgttcaaagtccctttgctgttaccaaagaaaacagaaccgaaggtcattttagccgtgctacctggattcggatttgctttgctgcagtcaacggtgatgctgaaaggtttagctttagcgccaacggtgtcattcagtacgccagcatcgatttcaccaacggttgcggtttgcagcaggatcagaccatccttgttaccgccgtcaacgcgggtttcacaggtgttatcaacaaccagaccactgatatttaactgaccgccgtccatatcagcagaagcagtacctgcaaccatcgccagcataagaccagacagggcaaaacctaattttttagacataaaaatcctttaataaaattccattagtcagactacatgtttgaagaatgactattcatgacacaaataggagaaacaaatgttagatattaatgagcaatgatatttgttacccaaatttacaaccattgttcattaggtcgcctattgtgcactttagaagcttttgaacaaattaaatttacttaattcaaaattaagtaaaaataagttcacaagtgcaattggttagggtatggagatgggattgatatttatttataggaagttatattatttccgcaaagagatgtttaaactaaaatcgtaattaaggaaagagatgagatatgattttcagaaaatatttatattcgcaatataaataaattaccatttgtttaatttgtcaaatgctcttgtatgtaagatttgacgcaacatctccccatcaggaaacaccaactccggcgcgatttcaaacagcggccacagcataaatccacgattcttcatatcgtagtgcggaacggtcaggcgttcagtatttatcacttcattaccaaacagcatgatgtcgagatccagcgtgcgtggtccccagcgttcagctttgcggacgcgaccttgctgcaattcaatacgctgtgtgtgattgagtagctcttcaggtgcaagagaggtttccagcgccacggctgcgtttaagtaatcgggttgatcttgcggccccagcggtggggtgcggtaaaacgaagaaacggtaagaatgtggctttcagggatatcgcctaatgctttcagggcagcattgacctgctccagcggagaggccagattgctgcctatggcaatatacgccactgtcatgcggtaccctcacgacgtggtgcgcgtttgcgtggacgacgagtacgacgacgcggtgacggttcttcatccagctcgttgagcatccctttttggtctggtggcgcggaaacctggaactcaccccaccatttcaccagacgctgcagttcagcgttacgctcaacttcagctcgcaaggccaacaggtcataagccgcacggaacttaggatgctccagcagtttccatgcgcgtttaccctgacgacgggacatacgcaactgcaactgccagatatcgcgggttaatgtcgtcagacgtttcgggattgccagtgaacggcaggcttcgtccagcacgtcgttcatcgccagcgcgaaagcgtcgtgataggtcaggccgctttcctgggcgatcttctgtgccgtctccagcagtgggtaccagaacatggcggcaaacaggaacgccgggttcacgcgcatatcgttatggatacgcgtatcggtattcttcagcacctgttcaatgatccgctccatcgggctgtcgccattttccgtgaagtagcgggtaatggtcgggaacagcggctggaacagatgatattcacacaacagcttataggtttcgtaaccgtagcccgcttgtagcagtttaagcgattcttcaaacaggcgtgccggtgggatatcgttcagcagggtagcgaggcgagggatcggttctgcggtttccgggctgatgcgcatacccaatttggcggcaaaacgtaccgcgcgcagcatacgtaccggatcttcacggtagcgcgtttccgggttaccaatcagacggataacgccgtccttcagatccttcatgccgccaacgtaatcacggacggtaaaatccgctacgctgtaatacaggctgttgatagtgaaatcgcggcgctgggcgtcttcttcgatggagccgaaaatgttgtcgcgcagcaacatgccgttttgcccgcgttgggaggtcgtgcggtcgctgacgttaccttcgtggtgtccacggaaggtcgcaacttcgataatctccgggccaaacattacatgagccagacggaaacggcgacccaccaggcggcagttacggaacagtttgcgcacctgctcaggcgtggcgttagtggttacgtcaaaatctttcggctttttgccaagtaacaggtcgcgcacgccgccgccaaccagccaggcttcgtatcccgctttattgagcctgtacattaccttcagggcattttcactgatatctttgcgggaaatagcatgctgctcacgcgggatcaccgtcacctgtggacgggcgactgcctgttcagcctcgctttcctcgcggcttagcaccttgcggcaaaaattagcgactcgggtaaaaatagtacacctcggtagtgtcaaacatcattcaggacaaaaaaatagcggctaatcatagctcagcatgacgcatttgagaatgttgaatttacaattgccgactcgggcacggcggtaagccgccagtttttgacggctgactgaaggatttgctcgacgctgaaatcctgccagtgtgcttctgcctgctgccccagaaattgaagtgccgcgattagtaccgggcgtggatcgcctttcggcaacgcaggcgcatgattctgcttggaaagtttagcgccttgtggattaagcgccagcggcagatgaatgtaatctggcactttccagccaaaaagctggtacagcgagatttgccttactgttggttcaatcagatcagccccacgcactatttctgtaacgccctggaaatgatcatcaaccacaacagccaggttgtaggcgaacaacccatcacggcgatgaatgataaaatcttcccgtgccagtttttcgtcggcgtgaataatgccgcgcagctggtcagtaaattgcgtgaccggatgctgctggcggatacgcactgcggcgttgtctggtccatgatgcaacacccggcaatgaccgtcgtaaataccgccaatgctttgaatacgcgcacgcgtacaggtgcagtaataacttagtccttgttcatgtaaccaggcgagtgcttcacgataggcgtcgtgacgttgcgattgccagagaacatcgccgtcccagtgcagaccgtaatgttccagctggcgcaggatagtttctgcggcaccgggaacttcacgaggcgggtcgatatcttctatgcgtaccagccagcgaccttgccgggcgcgagcctgcaaatagctgccgagcgcggcgatcagagagccaaaatgaagctcgccggaaggagagggggcgaagcggccaatatactgtgtgtctgtcatctctttgaacaaaaaataaggcgggagcatttcccgcctgtggtaaacgtgatggaacggctgtaattagccagccatctgtttttcgcgaatttcagccagcgttttgcagtcgatgcacagatcggctgtcgggcgcgcttccagacggcgaataccaatttcaacaccgcaggattcgcagtagccgaaatcttcgtcttccacttttttcagcgtcttctcgatctttttgatcagcttacgctcgcgatcgcggttacgcagttcgaggctgaactcttcttcctgggctgcacggtctaccgggtccgggaagttggctgcttcatcctgcatatgtgtaacggtgcgatcgacttcatccctgagttgattacgccatgcttccagaatacgacggaagtgcgccagctgggcttcattcatatactcttcgcccggcttctcctgatatggttccaccccagcgatggcgagaatactcagggacgatgttttacggttttgcccttcttgcatgttgcttctccttaacacgcactatcgatccccatgttcgggggaaaaatgaggccgctataaatagcagatgcttttccggatagcaattatctaaacgtaacacttgacaactgtgtgaggaaaagcgtatttgcgcacgcgaccagaatgtaaattaaccagttacttactttactacaatgtaaccggcagtgattttttaagagccatgccttcagcagaaatttccgctttgtaagccagaatttctacccccctctgttgagcttctgacaatagttgcgcgtatttctcatcgatgtggcgcgcgggtgaaaaccgtgtaatggctgaatgcagcacggcgaaaaagataaccgcacgctggccttcagccgctacgctcatcaactcccgaaggtgtttctgacctcgttcagtgaccgcatcgggaaaatatccctgttcgttctccgctaacgtaaccgatttcacttcaatatagcagtctggacgcgaatccgcctgcaacataaagtcaatacggctgcgttctgcgccgtattttacttcgcttttcagcgagctatagcctgacagttctgaaattgattcattaaggatagcctctttcgtcaacctgttagcccaaagcgtgttgacgcaaataaatgcgccgctctggctttgagttaattcccaggtgtgtgggtatttccgtttggtgttgtctgaagtcgaataccagacggtatcgccaggcgttgcacaaccggtcatcgcacccgtattcgggcagtgtagcgttaattcgcgaccatcgggtgtgatcacatcggctaaaaaacgtttgtaacgctgaattagcgtcgcgcgctgtagagggggagaaaattccattgcgacaatccttgttattgcgttagcgcccagcgttttagcggcgtgtagcgtgtgcgtccacgggcaaacgaggaggcgtaaagggtgaactccgtcaccgcatacgaccagttaaaacctggcggcgggattgtcaccgcctcgctggcgtcgcgcaataaggtaatatgtggatgaaacggacgattgctttgaaaacaaccgctgcgggcagcctgtgaacggagcatattcgccagctggattaagccgcgtggcggctgacgcatccctaaccacaccacacgcgaacgcagccattgtccggcgtcatcaagcgtgagtgtgaaaccaggttgacgaatccgtccggctaaaagagaaagcgccttctctttctcggcgctcacttcgcctaaaaatgccagagtcagatgcaaattatcggcggcgaccggacgtcccgcctcaggtgggaagtgtgtggcgcgccaatggataatctgttcgcggatttctgcaggtaagtcgatagcaaagaacagacgttgcggttcagacatgtgaggcactcggttatgaattaccgcgatgctacaatgtggcgcgaagaatgttaaccctctggagcgttttgtgtcgtcgttgcccgttgctgccgtcttacctgaattacttaccgctctcgattgtgcgccgcaggtattattaagtgcgccgaccggggccgggaaatcaacctggctgccgctgcaactgctggcgcatcccggcattaacgggaaaattatcctgctggagccgcgtcgtctggcggcgcgtaacgtcgcgcaacggctggcggagctgcttaacgaaaagccaggcgataccgttggctaccggatgcgtgcgcaaaactgcgtcgggccgaatacccgcctggaagtggttaccgaaggcgtgctgacgcgcatgatccagcgtgacccggaactgagcggtgttggactggtgatccttgatgaatttcatgagcgcagcttgcaggcggatttggcgttggcgctgttactcgatgtgcaacaaggtctgcgtgatgaccttaaactgctgattatgtcggctaccctggacaacgaccgcttgcagcaaatgctgccagaagcgcctgtcgtcatctcagaagggcgctcgtttccggttgaacgccgttatttaccgctgcccgcgcatcagcgttttgacgatgccgttgcggtagccaccgctgaaatgctgcgtcaggaaagcggatcattactgttatttttacctggcgtcggagaaattcagcgtgtgcaggaacaactggcttcgcgcatcggcagtgatgtattgctctgcccgctgtatggcgcgttgtcgctgaacgatcagcgaaaagcgatcctcccggcaccgcaagggatgcgcaaagtggtgctggcgaccaatattgctgaaaccagtttaaccattgaaggtattcgtctggtggtggattgtgcccaggagcgtgtggcgcgttttgatccgcgcacggggcttacgcgactgattactcaacgcgttagccaggcatccatgacgcagcgtgccgggcgcgccgggcgtctggagccgggtatcagcctgcatttaatcgccaaagaacaagcagaacgcgccgcggcgcaaagtgaaccggagatcttacaaagcgatctttccggtttgctgatggaattactgcaatggggatgcagcgatccggcgcagatgagctggctggatcaaccgccagtagtgaatctactggccgcgaaacgtctgttacaaatgctgggggcactggagggtgaacggcttagtgcgcaagggcaaaaaatggcagcgctgggtaacgatccgcgtttagcggcaatgctggttagcgcgaagaacgacgacgaagctgctaccgcggcaaaaattgccgccattctcgaagagccgccacggatgggcaatagtgacctgggcgtggcgttttcgcgcaatcaaccagcctggcagcaacgtagtcagcaactgttaaaacgcttaaacgtacgtggcggtgaggcagacagttcgcttatcgcgccgctacttgccggggcgtttgccgatcgcattgctcgtcgccgtgggcaagatggacgctatcaactggcaaacggcatgggagcgatgctcgatgccaacgacgcgctaagccgccacgaatggttgatcgcaccgttattattgcagggcagcgcctcgccggatgcgcggattttactggcgctgctggtcgatattgatgagttagtacaacgctgcccgcagctggtacagcagtctgacactgtggagtgggatgacgcgcaaggtacgctgaaagcctggcgtcggctacaaatcggtcagttgacggtgaaagtgcagccgctggcgaaaccgtcagaagacgagttgcatcaggcgatgcttaatggcatccgtgataaaggtttaagcgtgctcaactggacggcggaagcggaacagctacgcttgcgtttgttatgcgccgcaaagtggttgccggaatatgactggccagcggttgatgatgaaagtttattggcagcgctggaaacgtggctgctgccacatatgactggcgtacattcactacgcggcctgaaatcactcgacatttatcaggcactacgcggattacttgattggggaatgcagcaacgtctggatagtgaattgcctgcgcattacactgtgccgacgggaagccggatcgccattcgttatcatgaagataacccgcccgcgctggcggtgagaatgcaagagatgtttggcgaggccaccaatccgacgatcgcccaggggcgcgtgccgctggtgctggagttgctttcacctgcccaaaggccattacaaatcacacgagatttgagcgacttctggaaaggagcgtaccgtgaggtgcaaaaagagatgaaagggcgttatcccaaacatgtctggccggacgacccggcaaatactgcaccgacgcgacggacgaaaaagtattcgtaaggttggttttctccctctccctgtgggagagggccggggtgagggcatcagcgcgcacgttcaccctcaccctaaccctctccctcaagggagaggggaccgatcgagcacaaattttgagagatatcttcttctgtcttgtaacagaagaacagaaaatcgggcttttgcgcctgaatattgcggagaaaaagcatggccgggaatgaccgcgagccaattggacgcaaagggaaaccgacgcgtccggtcaaacaaaaggtaagccgtcgtcgttacgaagatgacgatgattacgacgattatgatgactatgaggatgaagaaccgatgccgcgcaaaggtaagggcaaaggcaaagggcgtaagcctcgtggcaaacgcggctggctatggctactgctaaaactggctatcgtttttgccgtgctgatcgccatttacggcgtttatctcgatcaaaaaattcgtagccgtattgatggcaaggtctggcaactgcctgcggcagtttatggccgaatggtcaatcttgagccagacatgaccatcagcaagaacgagatggtgaagctgctggaggcgacccagtatcgtcaggtgtcgaaaatgacccgtcctggcgaatttaccgtgcaggccaacagcattgagatgattcgccgtccgtttgatttcccggacagtaaagaaggacaggtgcgcgcgcgtctgacctttgatggcgatcatctggcgacgatcgtcaatatggagaacaaccgtcagttcggtttcttccgtcttgatccgcgtctgatcaccatgatctcttcgccaaacggtgagcagcgtctgtttgtgccgcgcagtggtttcccggatttgctggtggatactttgctggcgacagaagaccgtcatttttacgagcatgatggaatcagtctctactcaatcggacgtgcggtgctggcaaacctgaccgccggacgcacggtacagggtgcgagtacgctgacgcaacagctggtgaaaaacctgttcctctccagcgagcgttcttactggcgtaaagcgaacgaagcttacatggcgctgatcatggacgcgcgttacagcaaagaccgtattcttgagctgtatatgaacgaggtgtatctcggtcagagcggcgacaacgaaatccgcggcttcccgctggcaagcttgtattactttggtcgcccggtagaagagctaagcctcgaccagcaggcgctgttagtcggtatggtgaaaggggcgtccatctacaacccgtggcgtaacccaaaactggcgctggagcgacgtaatctggtgctgcgtctgctgcaacagcaacagattattgatcaagaactctatgacatgttgagtgcccgtccgctgggggttcagccgcgcggtggggtgatctctcctcagccagcctttatgcaactggtgcgtcaggagctgcaggcaaaactgggcgataaggtaaaagatctctccggcgtgaagatcttcactacctttgactcggtggcccaggacgcggcagaaaaagccgccgtggaaggcattccggcactgaagaaacagcgtaagttgagcgatcttgaaactgcgattgtggtcgtcgaccgctttagtggtgaagttcgtgcgatggtcggaggttctgagccgcagtttgcgggctacaaccgtgcgatgcaggcgcgtcgttcgattggttcccttgcaaaaccagcgacttatctgacggccttaagccagccgaaaatctatcgtctgaatacgtggattgcggatgcgccaattgcgctgcgtcagccgaatggccaggtctggtcaccgcagaatgatgaccgtcgttatagcgaaagcggcagagtgatgctggtggatgcgttgacccgttcgatgaacgtgccgacggtaaatctggggatggcgctggggctgcctgcggttacggagacctggattaaactgggcgtaccgaaagatcagttgcatccggttccggcaatgctgctgggggcgttgaacttaacgccaatcgaagtggcgcaggcattccagaccatcgccagcggtggtaaccgtgcaccgctttctgcgctgcgttcggtaatcgcggaagatggcaaagtgctgtatcagagcttcccgcaggcggaacgcgctgttccggcgcaggcggcgtatctgacactatggaccatgcagcaggtggtacaacgcggtacgggtcgtcagcttggggcgaaatacccgaacctgcatctggcagggaaaacagggactaccaacaataacgtagatacctggtttgcgggcattgacggcagcacggtgaccatcacctgggtcggccgtgataacaaccagccgaccaaactgtatggtgccagcggggcaatgtcgatttatcagcgttatctggctaaccagacgccaacgccgctgaatcttgttccgccagaagatattgcagatatgggcgtggactacgacggcaactttgtttgcagcggtggcatgcgtatcttgccggtctggaccagcgatccgcaatcgctgtgccagcagagcgagatgcagcagcagccgtcaggcaatccgtttgatcagtcttctcagccgcagcaacagccgcaacagcaacctgctcagcaagagcagaaagacagcgacggtgtagccggttggatcaaggatatgtttggtagtaattaacatctaagcgtgaaataccggatggcgagttgccatccggtaaaataacatcccatctaagatattaaccctttcttttcatctggttgtttattaacccttcaggaacgctcagattgcgtaccgcttgcgaacccgccagcgtttcgaatattatcttatctttataataatcattctcgtttacgttatcattcactttacatcagagatataccaatggcgcgttccaaaactgctcagccaaaacactcactgcgtaaaatcgcagttgtagtagccacagcggttagcggcatgtctgtttatgcacaggcagcggttgaaccgaaagaagacactatcaccgttaccgctgcacctgcgccgcaagaaagcgcatgggggcctgctgcaactattgcggcgcgacagtctgctaccggcactaaaaccgatacgccgattcaaaaagtgccacagtctatttctgttgtgaccgccgaagagatggcgctgcatcagccgaagtcggtaaaagaagcgcttagctacacgccgggtgtctctgttggtacgcgtggcgcatccaacacctatgaccacctgatcattcgcggctttgcggcagaaggccaaagccagaataactatctgaatggcctgaagttgcagggcaacttctataacgatgcggtcattgacccgtatatgctggaacgcgctgaaattatgcgtggcccggtttccgtgctttacggtaaaagcagtcctggcggcctgttgaatatggtcagcaagcgtccgaccaccgaaccgctgaaagaagttcagtttaaagccggtactgacagcctgttccagactggttttgactttagcgattcgttggatgatgacggtgtttactcttatcgcctgaccggtcttgcgcgttctgccaatgcccagcagaaagggtcagaagagcagcgttatgctattgcaccggcgttcacctggcgtccggatgataaaaccaattttaccttcctttcttacttccagaacgagccggaaaccggttattacggctggttgccgaaagagggaaccgttgagccgctgccgaacggtaagcgtctgccgacagactttaatgaaggggcgaagaacaacacctattctcgtaatgagaagatggtcggctacagcttcgatcacgaatttaacgacacctttactgtgcgtcagaacctgcgctttgctgaaaacaaaacctcgcaaaacagcgtttatggttacggcgtctgctccgatccggcgaatgcttacagcaaacagtgtgcggcattagcgccagcggataaaggccattatctggcacgtaaatacgtcgttgatgatgagaagctgcaaaacttctccgttgatacccagttgcagagcaagtttgccactggcgatatcgaccacaccctgctgaccggtgtcgactttatgcgtatgcgtaatgacatcaacgcctggtttggttacgacgactctgtgccactgctcaatctgtacaatccggtgaataccgatttcgacttcaatgccaaagatccggcaaactccggcccttaccgcattctgaataaacagaaacaaacgggcgtttatgttcaggatcaggcgcagtgggataaagtgctggtcaccctaggcggtcgttatgactgggcagatcaagaatctcttaaccgcgttgccgggacgaccgataaacgtgatgacaaacagtttacctggcgtggtggtgttaactacctgtttgataatggtgtaacaccttacttcagctatagcgaatcgtttgaaccttcttcgcaagttgggaaggatggtaatattttcgcaccgtctaaaggtaagcagtatgaagtcggcgtgaaatatgtaccggaagatcgtccgattgtagttactggtgccgtgtataatctcactaaaaccaacaacctgatggcggaccctgagggttccttcttctcggttgaaggtggcgagatccgcgcacgtggcgtagaaatcgaagcgaaagcggcgctgtcggcgagtgttaacgtagtcggttcttatacttacaccgatgcggaatacaccaccgatactacctataaaggcaatacgcctgcacaggtgccaaaacacatggcttcgttgtgggctgactacaccttctttgacggtccgctttcaggtctgacgctgggcaccggtggtcgttatactggctccagttatggtgatccggctaactcctttaaagtgggaagttatacggtcgtggatgcgttagtacgttatgatctggcgcgagtcggcatggctggctccaacgtggcgctgcatgttaacaacctgttcgatcgtgaatacgtcgccagctgctttaacacttatggctgcttctggggcgcagaacgtcaggtcgttgcaaccgcaaccttccgtttctaatttctcttttggggcacggatttccgtgcccatttcacaagttggctgttatgcaggaatacacgaatcattccgataccacttttgcactgcgtaatatctcctttcgtgtgcccgggcgcacgcttttgcatccgctgtcgttaacctttcctgccgggaaagtgaccggtctgattggtcacaacggttctggtaaatccactctgctcaaaatgcttggccgtcatcagccgccgtcggaaggggagattcttcttgatgcccaaccgctggaaagctggagcagcaaagcgtttgcccgcaaagtggcttatttgccgcagcagcttcctccggcagaagggatgaccgtgcgtgaactggtggcgattggtcgttacccgtggcatggcgcgctggggcgctttggggcggcagatcgcgaaaaagtcgaggaagctatctcgctggttggcttaaaaccgctggcgcatcggctggtcgatagtctctctggcggcgaacgtcagcgggcgtggatcgccatgctggtggcgcaggatagccgttgtctgttgctcgacgaaccgacctcggcgctggatatcgcccaccaggttgatgtgctgtcgctggtgcaccgtttaagtcaggagcgtggcctgacggtcattgccgtgttgcacgatatcaatatggcggcacgctactgtgattatctggtcgccctgcgcggcggtgaaatgattgctcagggaacgcctgcggaaattatgcgcggcgaaaccctcgaaatgatttatggcatcccgatgggtattttgccgcatccggcgggtgctgcacctgtgagttttgtttattgatgagcggcttacctcttatttcgcgccgtcgactgttaacggcgatggcgctttctccgttgttatggcagatgaataccgcccacgcggcggctattgatcccaatcgtattgtggcgctggagtggttgccggtggaattactgctggcgctcggcatcgtgccttacggcgtggcggataccatcaactatcgcctgtgggtcagcgaaccaccattgccggactcagtgatcgacgtcggtttgcgcacagaacctaaccttgaactgctgaccgaaatgaaaccatcgtttatggtctggtcggcaggatatggcccttcaccagaaatgctggctcgtattgcgccgggtcgcggatttaacttcagtgacggcaaacagccgttggcgatggcgcgtaaatcgctgacggaaatggcagatttacttaacctgcaaagcgcagcggaaacgcatttagcgcaatatgaagactttatccgcagcatgaaaccccgctttgtgaagcgtggtgcgcgtccgttattgctgacgacgcttatcgatccgcgccatatgctggtcttcggtccaaacagcttgttccaggaaattcttgatgagtacggcatcccaaatgcctggcaaggggaaaccaacttctggggcagtaccgccgtcagtatcgatcgtctggcggcgtataaagacgttgatgtgctctgttttgatcacgacaacagcaaagacatggatgcgctaatggcaacgccgctgtggcaggccatgccgtttgtccgcgccggacgctttcagcgcgtacctgcagtctggttttatggtgcgacgctctcggcaatgcactttgtgcgcgttctggataacgccatcggaggtaaagcgtgagtaaacgaattgcgcttttcccggcgttattgctggcgctgttagtgattgtcgctacggcgctcacctggatgaacttctcgcaggcgctgccgcgtagccagtgggcgcaggctgcctggtcgccggatattgacgtcatcgagcagatgatttttcactacagcttgttgccgcgtctggcgatttcgctgctggtgggcgcgggtctggggctggtgggcgtgctgtttcagcaagtgctgcgtaacccgctggcggagccgacgacgcttggcgttgctacaggcgcgcaactggggattaccgtcactacgctctgggcgatccctggtgcgatggcgagccagtttgctgcgcaggcaggggcttgtgttgttggcttaattgtctttggcgtcgcgtgggggaaacggctgtcgccggtaacgctgattctcgcggggttggtagtgagcctttattgcggcgcaatcaatcagttactggttatcttccatcatgaccaactgcaaagcatgtttctgtggagcactggaacgctgacgcaaaccgactggggcggcgttgagcgtttatggccgcagctgctgggcggtgtgatgctgacgttgctgctacttcgtccgttaaccctgatggggcttgatgatggcgtggcgcgcaatctcgggctggccttgtcgcttgcgcgtctggcagcgctgtcgctggcgattgtcatcagtgcgctgctggtgaacgctgtggggattatcggctttatcgggttgttcgcgccgctgctggcaaaaatgctgggggcgcggcgtctgctgccacgactgatgctggcgtcgttgattggtgcgctgatcctctggctttccgatcaaatcatcctctggctgactcgcgtgtggatggaagtgtccaccggttcggtcactgcgttgatcggtgcgccgctgctactgtggctgttgccgcgtttacgcagcattagcgcgccggatatgaaggtcaacgatcgtgtcgcggctgaacgccaacatgtgctggcgtttgccctcgcgggcggcgtgctgctgttgatggctgtggtggtggcgctgtcgtttggtcgtgatgcgcacggctggacgtgggcgagcggggcgttgctcgaggatttaatgccctggcgctggccgcgaattatggcggcgctgtttgcgggcgtcatgctggcggtggcgggctgtattattcagcgactgaccggaaacccgatggcaagcccggaagtgctggggattagctccggcgcggcgtttggcgtggtgttgatgctgtttctggtgccgggtaatgcctttggctggctgttacctgcaggcagtctcggcgcggcggtgacgctgttgatcattatgatcgccgccggccgcggtggattttccccacaccgtatgttactggcggggatggcgttaagcaccgcgttcaccatgcttttgatgatgttgcaggcaagtggtgacccgcgaatggcgcaagtgctgacctggatttccggttcgacctacaacgcgaccgatgcgcaggtctggcgcaccggaattgtgatggtgattttgctggcgattaccccgctgtgccgccgctggctgaccattttaccgctgggtggtgataccgcccgagccgtaggaatggcgctgacgccgacgcgaattgcgctgctgctgttagcggcttgcctgacggcgaccgcgacgatgactattggaccgttgagttttgttggtttaatggcaccgcatattgcgcggatgatgggctttcgacggacgatgccacacatcgtaatttcggcgctggtgggtggtttactgctggtgttcgctgactggtgtgggcggatggtgctgtttccattccagatcccggcggggctgctgtcaacctttatcggcgcgccatattttatctatttgttgagaaagcagagccgttaatttttccatataacggccctgtacgcctggacggataaagcgtttacgcgacaacggatgcccgatgcgacgctggcgcgtcttatcgggcctacaaacggccccgaatcgtaggtcggataaggcgttcacgccgcatccgacaaaccatgctggatcacaacttcgcaaacacccgacgtgcagcatcgatggtgttattgatatcttccatgctgtgcgccacggacataaagcccgcttcaaacgctgacggtgccaggtaaacaccttcgtccagcatcatatggaagaaacgcttaaagcgttccacgtcacaggccatcacatcctgatagcacgtcacggactcggcgtcggtaaagaaaataccgaacatgccgccaacgtggttaacgaccagcggaattccggcttcttctgccgcttccagcagaccttctgccagacgtgttgtcagctcatccagcgtttcgtgaacgcccggctgcgcgacttcattcagacaggcgaaacccgctgccatcgcaatcgggttaccggaaagcgtacccgcctgatagaccggacccgtcggggccagcgcatccattacatcacgacgaccaccgaatgcgcctaccggcattccaccgccgatgattttgccgaggcaggttaaatctggcactacgccgtaataatcctgtgcgccagctagcgctacgcggaaaccggtcatcacttcatcgatgatcagcaacgcgccaaattcgtcgcacagcgcgcgcagacctggcaggaactctggcagcggcggaacacagttcatattgcctgccaccggctcgacgataatacaggcaatctcttgcgggtattgctcaaatgcggcgcgtacagaagccagatcattataagtacaggttaaggtatatttggcgaaatctgccggaacgcccggcgagtttggctggcctaacgtgagtgcgccagaaccggctttcaccagcaggcagtcagcgtgaccatggtaacacccttcaaatttaataattttgtcgcgaccggtaaaaccacgggccaggcggatggcgctcatggtcgcttcagtgccggagttcaccatgcgcaccatatccatggtcgggaccagttcggtcaccagttgcgccattttcacttccatttcggttggtgcaccaaagcttaaaccacgctcggcggcttcaatcacggcattgcggattgccggatggttatggcccagcaccatcggcccccaggaaccgacataatcgatataggctttgccatcaacatcgtacagataagcgccgtccgctttttcgataaacagtggagtgccgcccacgccagtaaaggcgcgaacaggggagttcacaccgccagggatcagctcgcgcgctgcgctgtaaagattttcagacttactcatggagggttcctgattcgtagaaaaagtgaatggctgctattctatgttattcataacaagttaaatactcgtcaaacatcaggctgcttgtactggtgcaatcctgatttcttagagtataaaagttttgtgcatttgaaacattacgctttgcaaaggattttcatggaacgtgcgagtaaaatgccgtcatcttatttgtatgaccaataagtgatcattggatgaaaactgatactccctctttagaaacaccgcaggccgcgcgcctgcgacgcagacaactgattcgccaacttcttgagcgcgataaaaccccgttagccattttgtttatggcggcagtcgtcggcacgcttgttgggctggcagcggttgcttttgacaaaggtgtcgcctggttgcagaaccaacgtatgggggcgctggtacatactgctgataattatccgcttctgttaaccgtcgcttttctctgttcggcggtgctggcgatgtttggctactttttggtgcgcaaatacgcgccggaagcaggtggttcggggatcccggaaattgaaggggcgctggaagatcaacgtcccgttcgctggtggcgtgtattgccggtgaagttctttggcgggctggggacactcggcggaggcatggtgttggggcgcgaagggccaaccgtgcagatcggcggtaacattggccgtatggtgcttgatattttccgcctgaaaggtgacgaagctcgccatacgctgctggcaaccggtgctgctgcggggctggctgcggcctttaacgcgccgctggcgggtattttgtttattatcgaagagatgcgtccgcagtttcgctatacgttaatttcgattaaagcggtatttattggtgtcattatgtcgaccattatgtaccggatttttaatcatgaagttgcgttgattgacgtcggtaaactttctgatgcgccgcttaatacgctgtggctttatctgatcctcggtattatttttggcattttcggccctatttttaataaatgggtgctggggatgcaggatttgctgcaccgtgtgcacggcggcaatattaccaaatgggtgctaatgggcggtgcgattggcggtctgtgtggattgctggggtttgtggcaccagcaacgtcgggcggcggttttaacctgattcctatcgctaccgcggggaatttcagcatgggaatgctggtgtttatcttcgtcgcgcgggtcattaccaccttactctgcttctcttccggcgcgccgggcggtatttttgccccgatgctggcgctgggtactgtgctgggaaccgctttcggaatggttgccgttgagctgtttccgcaatatcaccttgaggcggggacgtttgctattgccggaatgggggcattactggcggcatctattcgcgcgccgttaacggggatcattctggttctggagatgaccgataactaccagctcattttgccaatgattattaccggtcttggcgcaacactattagcgcaatttaccggcgggaaaccgctatactcggcgattcttgcgcgcacgctggcaaaacaggaagctgagcaactggcgcgaagcaaggccgcatcagccagcgagaatacttgaacgaaataccagggtattagataatggcgattattattgggttagaatttgcccaattgccgatgtcgtttggagcaaaatatgagtgatgacgtagcactgccgctggagtttaccgacgcagcagccaacaaagttaaaagcctgatcgctgacgaagataacccgaatctgaaattacgcgtgtatatcaccggtggcggttgcagcggcttccagtatggtttcacctttgatgatcaggtgaacgaaggcgatatgaccatcgaaaaacagggcgttggcctggtggttgatccgatgagcctgcaatatctggtcggcggttccgttgattataccgaaggtctggaaggttctcgtttcatcgtgaccaacccgaacgcgaaaagcacctgcggttgcggttcttcctttagtatctaatctgttgttcatgtgccggataaactatccggcacatcttctctcttcaacgcccattctcatccagcgcaaacgtcggtagcttaagatgccaacgaatagccgccagccgaatcaatagcgtcacgaccatgcccatcatactggctgtttccagtggtacggaaaatgtgtaataagccgtagcgtggacaataccgccgataatacaggcagttgcgtagatttctgtacgtaaaatcatggggatttcgcgggccagaacatcacgaatgatcccgccgccaacgccagtaatgacgcccatacaaaccgcgattaacggaccggcttccgcattaaaggctttattcacgccaatgccgacaaacaccgccagaccaacggcgtccagcaccggcaacatccattttggtaagcgtcttggctggcgcaccagcacgatggtcagcatgctggtgaccattgcaacgaccagatcggtgggatctttcacccaaaataccgggccgtgatccagcgccatgtcgcgaattgtcccgccgcctactgcggttaccacgcccagtaccagaacaccaaaagggtccatacgcaattttccggctaacaaaacgccggagatggcaaataccgctgtgccgactatatccagccaatagacgagcattgttcaatccccactgagcacctgaaaaggtcaggcgctaatctacctgtgaaagcgcattacagagctgttgtgcagcgaggataatacgtgggcttgcacgttcaaaccagtcactcgtgagaggaataacgggaattttgagctgttcaccccagtattgtttgattttaggaatttggtccggtccgcctgtaatgacaatcgcctgtggcgagcgtgctaacacctgttcgcggctaacttgcggccagggaacccggctgtctttaaagatgttttctccgccacaaacttcgagtacctggttctgaatcgactcttttccactggtaaatggcggattaatgccgaattgcagaaaaacacgttttttaggtttatcagcatattgcgctttcaattgcgcgtactgatccagcagggattgcgcggcttgttcggccttgtctggttgcggactccagggggccagttgacgtaacgcattggcaatttgttcaatgcttgtcgcatcgacccacatcacttttattcccagcgaagccagctggtcaacctgccgctcggcattacctccacgccaggcaatcaccagatcgggtttcagcgcgacaatgcgttccagattcatcccctgccaggtggaaacctgctcaatcttttgcgcttgtggaggatagtcggaatagctgctgaccccaaccggcgtgatcccggcggcaaaggcaagttcagtgttggcgggagaaagcgtgatgacgcgcggcgcggcgttgagccacagtggcgcaagaaaagacagggcgaccagcgccctgaacagtgacttagccatgtgcaagtttctgcaccagtgactcaaccatcaggctggactgtttagcggcaacagccaggaactcatcgaagctaagatgagactgttgatcggccacgtcggagatggcgcgtacgacaacaaacgggacgttgaaattgtggcagacatgggcgattgccgtcgcttccatctctacagcaatggcctgtgggaagttgtggcggattttcgccagaccaacagaaccgttgatgaaagcgtcgccgctaacaatcaggccacgtacagcgttaagattcagttcggcaatgcaggcctcagcggcagcgatcagtttatcgtcagctttaaagcctgccggacagcctggtaactgaccgtattcataaccaaatgccgtgacatccgcgtcgtgataacgtgcttcgtccgagacaacgatatcgcccactttcaacgttggtgccaggccaccggcagaaccggtgttaataatcacatctggcttgcagtgttccaacagcaaagtggcacccagcgccgcagcgactttaccgatgcccgatttcagaagcgcaacctcggttccattcagttggccggtatagatttcgcaaccgccgagactgatagtttgacggttttcgattttgtcacgcagcagcgtaacttcttcttccattgcaccaatgatgccgattttcatagatttactcgcgataagcccgatttgaaggcatagtttaccatgcgcttacggggaagcgtatttctcacgcgggagaggacatggcacagattgatttccgaaaaaaaataaactggcatcgtcgttaccgttcaccgcagggcgttaaaaccgaacatgagatcctgcggatcttcgagagcgatcgcgggcgtatcatcaactctccggcaattcgtcgtctgcaacaaaagacccaggtttttccactggagcgcaatgccgccgtgcgcacgcgtcttacccactcgatggaagtccagcaggtggggcgctacatcgccaaagaaattttaagccgtctgaaagagcttaaattactggaagcatacggcctggatgaactgaccggtccctttgaaagcattgttgagatgtcatgcctgatgcacgatatcggcaatccgccgtttggtcattttggcgaagcggcgataaatgactggtttcgccaacgtttgcacccggaagatgccgaaagccagcctctgactgacgatcgctgcagcgtggcggcactacgtttacgggacggggaagaaccgcttaacgagctgcggcgcaagattcgtcaggacttatgtcattttgaggggaatgcacaaggcattcgcctggtgcatacattgatgcggatgaatctcacctgggcacaggttggcggtattttaaaatatacccgtccggcgtggtggcgtggcgaaacgcctgagacacatcactatttaatgaaaaagccgggttattatctttctgaagaagcctatattgcccggttgcgtaaagaacttaatttggcgctttacagtcgttttccattaacgtggattatggaagctgccgacgacatctcctattgtgtggcagaccttgaagatgcggtagagaaaagaatatttaccgttgagcagctttatcatcatttgcacgaagcgtggggccagcatgagaaaggttcgctcttttcgctggtggttgaaaatgcctgggaaaaatcacgctcaaatagtttaagccgcagtacggaagatcagttttttatgtatttacgggtaaacaccctaaataaactggtaccctacgcggcacaacgatttattgataatctgcctgcgattttcgccggaacgtttaatcatgcattattggaagatgccagcgaatgcagcgatcttcttaagctatataaaaatgtcgctgtaaaacatgtgtttagccatccagatgtcgagcggcttgaattgcagggctatcgggtcattagcggattattagagatttatcgtcctttattaagcctgtcgttatcagactttactgaactggtagaaaaagaacgggtgaaacgtttccctattgaatcgcgcttattccacaaactctcgacgcgccatcggctggcctatgtcgaggctgtcagtaaattaccgtcagattctcctgagtttccgctatgggaatattattaccgttgccgcctgctgcaggattatatcagcggtatgaccgacctctatgcgtgggatgaataccgacgtctgatggccgtagaacaataaccaggcttttgtaaagacgaacaataaatttttaccttttgcagaaactttagttcggaacttcaggctataaaacgaatctgaagaacacagcaattttgcgttatctgttaatcgagactgaaatacatgaaaaaaaccacattagcactgagtgcactggctctgagtttaggtttggcgttatctccgctctctgcaacggcggctgagacttcttcagcaacgacagcccagcagatgccaagccttgcaccgatgctcgaaaaggtgatgccttcagtggtcagcattaacgtagaaggtagcacaaccgttaatacgccgcgtatgccgcgtaatttccagcagttcttcggtgatgattctccgttctgccaggaaggttctccgttccagagctctccgttctgccagggtggccagggcggtaatggtggcggccagcaacagaaattcatggcgctgggttccggcgtcatcattgatgccgataaaggctatgtcgtcaccaacaaccacgttgttgataacgcgacggtcattaaagttcaactgagcgatggccgtaagttcgacgcgaagatggttggcaaagatccgcgctctgatatcgcgctgatccaaatccagaacccgaaaaacctgaccgcaattaagatggcggattctgatgcactgcgcgtgggtgattacaccgtagcgattggtaacccgtttggtctgggcgagacggtaacttccgggattgtctctgcgctggggcgtagcggcctgaatgccgaaaactacgaaaacttcatccagaccgatgcagcgatcaaccgtggtaactccggtggtgcgctggttaacctgaacggcgaactgatcggtatcaacaccgcgatcctcgcaccggacggcggcaacatcggtatcggttttgctatcccgagtaacatggtgaaaaacctgacctcgcagatggtggaatacggccaggtgaaacgcggtgagctgggtattatggggactgagctgaactccgaactggcgaaagcgatgaaagttgacgcccagcgcggtgctttcgtaagccaggttctgcctaattcctccgctgcaaaagcgggcattaaagcgggtgatgtgatcacctcactgaacggtaagccgatcagcagctttgccgcactgcgtgctcaggtgggtactatgccggtaggcagcaaactgaccctgggcttactgcgcgacggtaagcaggttaacgtgaacctggaactgcagcagagcagccagaatcaggttgattccagctccatcttcaacggcattgaaggcgctgagatgagcaacaaaggcaaagatcagggcgtggtagtgaacaacgtgaaaacgggcactccggctgcgcagatcggcctgaagaaaggtgatgtgattattggcgcgaaccagcaggcagtgaaaaacatcgctgaactgcgtaaagttctcgacagcaaaccgtctgtgctggcactcaacattcagcgcggcgacagcaccatctacctgttaatgcagtaatctccctcaaccccttcctgaaaacgggaaggggttctccttacaatctgtgaacttcaccacaactccatacatcttcatcatcctttaggcatttgcacaatgccgtacgttacgtacttccttatgctaagccgtgcataacggaggacttatggctggctggcatcttgataccaaaatggcgcaggatatcgtggcacgtaccatgcgcatcatcgataccaatatcaacgtaatggatgcccgtgggcgaattatcggcagcggcgatcgtgagcgtattggtgaattgcacgaaggtgcattgctggtactttcacagggacgagtcgtcgatatcgatgacgcggtagcacgtcatctgcacggtgtgcggcaggggattaatctaccgttacggctggaaggtgaaattgtcggcgtaattggcctgacaggtgaaccagagaatctgcgtaaatatggcgaactggtctgcatgacggctgaaatgatgctggaacagtcgcggttgatgcacttgttggcgcaggatagccgtttgcgggaagaactggtgatgaacctgattcaggcagaggagaatactcccgcacttactgaatgggcgcaacggctggggatcgatctcaatcaaccgcgagtggtggctattgttgaggtcgacagcggtcagcttggcgtggacagcgcaatggcggagttacaacaactgcaaaacgcgctgactacgcccgagcgtaataatctggtggcgattgtctcgctaaccgaaatggtggtgttgaaaccggcgttgaactcttttgggcgctgggatgcagaagatcatcgtaagcgagttgaacaactgattacccgcatgaaagagtacggccagctgcgttttcgcgtttcactgggcaactattttaccggtcctggcagtattgcccgatcctatcgtacggcgaaaacgacgatggtggtgggtaaacagcggatgccagaaagtcgctgctatttttatcaggatctgatgttacctgtgttactcgacagtttgcgtggcgactggcaggccaacgaactggcgcgaccgctggcgcggctgaaaacgatggacaataacggcttgctgcgacgaacgctggcggcgtggtttcgccacaatgtgcaaccgctggcaacgtcaaaggcgttgtttattcatcgtaataccctggagtatcggcttaatcgtatatcggaactgaccgggcttgatttgggcaattttgatgacaggttgctgctgtatgtggcgttacaactggatgaagagcggtaggttatgcgttaaggttgaggcggcgctggctcattcccctcagcccgaagggtagaggggaatgcccgaattaaccgtcagttcgggattatttacgcgttagtttttccagatcggcttcaatctcgctgatcttattggttacgactgactccaggtgacgtaagtcgtcgaggatcttacgcttaagatcaacttcgctgcggtcacgctggcagatttgatcaagctcatcaatgatataccgtagattcgggctgatttcctggacttctttataaccctgacccacaccatcagcgacgaccgttttacgctgacgcggatatttaaacttaacgctcttggcgaaaaactcgcctttgtctttctggaaatagattttcagaatatcgttgttggcttcctgccggaggctgtaacgatcaatttcttcaggattggtaatacccagacttttcagattgtcgtacatagcgttacctcaaaatgagtcagtaaattgtgcttattttagcatttggcctggcccgcccggctcgactgtgatcgcagaaagcctttttcttccagacttctatcatggcgtaaaaatcaaaaaattacctgctttattctggtgataaaattcacgatctacaccagttccagcatcgttacttccgggcggcagttcagacgcaaaccatacaaactgcccacgccacgggttgtgtagatgtgtctttcgccaaaggcatttaatccggcgacgtaacgtttatcttcgacaggggcaaaaggttcaccaaccaacggtacgcgcagttgcccgccgtgagtatggccgcacagcatcagatcccagggttcatcacgcatgacttctttgctgtcgggattatgcgccagcaccagtcttggcagattggcttcgctggcgggaggcggtttgcattgtccggcccataagtcaccagtgcctaccagttcgaattgcctgttcggcgtggcgatcaccgtagcctggttaaacaacaccgtgatgcccgctgatttcaacgtctcgccaattaagtgatttttttctgtaccaacagggcgatcgtggttgccgaagcaggcaaacgtcggcgcacattcggcaaggggggagagtacgtcactaaacgccgaaaaattcagcgacatatcaaataatacgtaatcgccgcccagtaatatcaaatcgggcttttgttctatgccaagagcaatcgcgtcagaaatcaggcttaaaggaacaaaacgagagtaatggagatcggccagaaaaagaattttgaatggtgctgcgttgtctttaaaaaaggcgaggcggtgacggattaattcaaaccagcctggctcacagtaatgcatataaccgaaacctgagctcgtggctatcgtcgcggcagtagcctgcaaaaatcggcggcgtgaaatcatcgctcatccctgcaaaaaaatcgggcagcgtcgtgctgcccgtgtgcatacttttagtcgatggtacgcagcagttcgttaatgccgactttgccgcgagttttcgcgtcaactttcttaacgataaccgcacagtagaggctgtatttgccatcttttgacggcagattacctgaaacaaccacagaccccgccggaacgcgaccgtagtggatttcgccggtttcacggtcgtaaatacgggtgctctgaccaatgtatacgcccatggaaatgacggaaccttcttcgacaatcaccccttcaaccacttcagagcgcgcgccgatgaagcaattatcttcaatgatggttgggttagcctgcagcggttccagcacgccgccgatgcccacgccaccggaaaggtggacgtttttaccaatctgcgcacaagaaccgacggtcgcccaggtatcaaccatggtgccttcatcaacatatgcgccgatgttgacgtaagacggcatcagcacggtgttacgggcaataaacgcaccctgacgtaccgccgctggtggcacaacgcggaagccttctttctggaaacgtgcttcgtcgtagtcggcgaatttcatcggcactttgtcgaagtagcggctttctgccccttcgatcacctgattatcattaatacggaaagagagcagcaccgcttttttcaaccactgatgcgtcacccactgaccgtcaattttttccgctacacgcagtgcgccggaatccagcagggcgatcacctgatttaccgcttcgcgggtaacggtgtctgcattggctggcgtgatctcggcacggcgttcaaaagcggtttcaataatgttctgtaactgctgcattgttaaactcttttcatatcagtaaacacatcaccctttatcgtttggattgagggcctctgtcaaccgctgatgcacttcctgctgcaactcgttattaagcgcacgccggtcagcggtggcaattatgaataaatcttctactcgctcgccaatggttgtaattcgggcaccatgaagcgaaattcccagatcggcaaaaattttcccgactcgcgccagcagtccaggttggtcgagggcgatcagttcgaggaacgatttgcggtcggtatgggtcggcaaaaacgttacttcggtttcaacagtaaaatggcgtaatttggcgggttggcgacggggctgcggtggctgccagctactttgcgtcagtacttgctccagaccaaaccgaataacctcatgacgatctgcggacagcgggttgccatcgggttccagcacgataaaggtatccatcgccataccgtcgcgagtggtgaaaatttgtgcgtcgtgaacacttaaattgcggcggtctaattcggcacagacggcggcaaacagataagggcggtccgggctccagataaaaatctcggtgcctccacgcgtagcctgcgggctaagcaataccagcggtttgcttaaatcatgctgtaataaatggcgggcatgccaggccagttgatttgggctatggcggacaaaatagttagcacgacagcgtgaccaaatttggtgcagcgcctcttcgtcgatgttatccatgcgcagtagtgccagtgcctggagttggtgatggcgaacccgttcgcgcatatccggcgtgttttgcattccgcgtcgtagctgcttttcggtggcaaagtagagctcacgcaacagactttgcttccagctattccacagcgtttcgttggtggcgcaaatgtcagccacagtcaggcataccagatagcgcagacgattttccgtttgcacttcttcggcaaactgcttgatgacttccgggtcctgaatatcgcggcgttgggcggtcaccgacatcaacaggtgctggcgaaccagccaggcgaccagctgtgtttcgcgtgagttcagcccgtggagttcggcaaaatgcactacatcctgagcaccgagaatggagtggtcgccgccgcgtcctttggcgatatcgtgaaacagcgcggcgatgaaaatcagctcagttgacggcaggcgcggccagacgtccacacacaacggatggcgctggcgcgtttcttcactggcaaaactctccagtttcagcatcacgcggatagtatgttcatccaccgtgtaggcgtggaacagatcaaactgcatctgcccgacgatatgcgaccattgcggcatatacgcgccgagcacgctatggcgatgcattggcaatagcccgcgccgcaccgctccggggtgacgcagaatgctcaaaaacagttttcgtgcttccggaatattacacagcggttgttgcagatggcgacgggcatggcgtaactggcgcagcgtggtggagtaaatgccggtgatcgcactgttgtgcaccatggtgtagaacatacgcaagatggcttccggctggcgcataaatagtgtttcatcacgcaggtcgattagcgtaccgcgtagctgaaactcatcgtcgattggacgtggtttttcgtcggcgggaagggcgaggatggcttcatcgaacagttgcagcagcatctggttgagttcactgacgcggcgtgtaacgcggaagtaatccttcatcatccgctcgaccggttcgttaccttcaccactgtaattcagacgctgggcgacgctaagctggcgatcgaataacaggcgattatcgtaacggctgacgaccagatgcagggcaaagcgaatacgccacaatatatgcagacattcgtttaattccgcccgctccgctgaggttaagaagccaaacccgaccatttcatccagcgatgttgcgccaaaatgacggcgggccacccattgcagagtgtggatatcgcgcaagccgccagggctgcttttgatgtctggttcaaggttgtagctggtgccatggtaacgctgatggcgctggttctgttcttcaactttcgccgcgtagaacttgtcggaaggccagaatccttcgctgaaaatatgtttttgcagttcgaggaacagcgcaacatcgccaattaataagcgggattcgattaaattggtggcgacggttaaatccgataacccttccagcatgcactcttcaagcgtgcgcacgctatgaccgacttccagctttacatcccagagcagcgttaacagctcgcccactttttgcgcctgatcgtccgggagctttttacggcttaaaatcagtaaatcgacgtctgaaagtggatgcagctcgccacgaccgtagccaccgacggcgaccaatgccaggtcggcaatctggctgaatcccgcttcaatccataatcgttgcaggagctggtcgataaactcggtgcgcgcctcaatcaactgttctgcagagatcccattgtcaaaggcatcacccagccaacgctggaaagtatcgatatgggcttttatcccaccgacggttaattcatcacggggccagacgcatggattttgcggttgaccgggcagggtggggagagcggtgtttgcgtactgttctggaagggtattcattgtgcgccacccataagattaaattatcgcattaaaaaagccggcattcgccggcttcatcttattcgtcgtgcgagattatcgccgggatggtgtcatccttgcgtagcgtcagaatttcgcagccgttatcagtcaccacaatagtatgctcatattgtgcagacaagctgcgatctttggtttttaccgtccagccatctttcatggtgcggatctcttttttacccgcgttgaccattggctcgatggtgaacgtcatcccaggtttcagtacgacgttggtttcacgggagtcatagtgcagcacctgcggttcttcatggaagccgcgaccaataccgtgtccgcaatattcacgaacgacggagaagccttctgcttcgacaaatttctgaatcgccgcaccgatttcgcgcagattaatgcctggttttaccatgcgtagcgccaggtacaggctttcttgcgtgatgcggcacagacgttcgcccatgatggtcggcttaccgacgataaacattttcgaggtatcgccgtggaaaccatctttgattacggtgacatcaatgttaacgatatcgccatctttcagcagcttagcatcgtccgggataccgtggcacaccacttcattaatagagatgcaaacggatttcggatagccgtgatagccgaggcaggcagaaaccgcgtgttgttcattaacaatgtaatcattacagatgcgatccagctcgccggtgctgacgcccggtttaacatacggttcgatcatctccagcacttcggcagccagtcggccagcgacgcgcattttttcgatatcttctggggtcttgattgagatagccattaattctgtccatcagcgtcggtgataccgacaatatatatgtaagtgccgtcaatggtatcacacccgggcaaattgagaatcattctgaatttcgccaaacgtgccactgaaggttttctataatagaaaattcgacgtctgatgctgtacacagcgccaacaattattggtgtccacgacgtatttgtggtataaagcgcgccggacttccgatccatttcgtatacacagactggacggaagcgacaatctcactttgtgtaacaacacacacgtatcggcacatattccggggtgccctttggggtcggtaatatgggatacgtggaggcataaccccaacttttatatagaggttttaatcatggcaactgtttccatgcgcgacatgctcaaggctggtgttcacttcggtcaccagacccgttactggaacccgaaaatgaagccgttcatcttcggtgcgcgtaacaaagttcacatcatcaaccttgagaaaactgtaccgatgttcaacgaagctctggctgaactgaacaagattgcttctcgcaaaggtaaaatccttttcgttggtactaaacgcgctgcaagcgaagcggtgaaagacgctgctctgagctgcgaccagttcttcgtgaaccatcgctggctgggcggtatgctgactaactggaaaaccgttcgtcagtccatcaaacgtctgaaagacctggaaactcagtctcaggacggtactttcgacaagctgaccaagaaagaagcgctgatgcgcactcgtgagctggagaaactggaaaacagcctgggcggtatcaaagacatgggcggtctgccggacgctctgtttgtaatcgatgctgaccacgaacacattgctatcaaagaagcaaacaacctgggtattccggtatttgctatcgttgataccaactctgatccggacggtgttgacttcgttatcccgggtaacgacgacgcaatccgtgctgtgaccctgtacctgggcgctgttgctgcaaccgtacgtgaaggccgttctcaggatctggcttcccaggcggaagaaagcttcgtagaagctgagtaataaggcttgataactcccccaaaatagttcgagttgcagaaaggcggcaagctcgagaattcccgggagcttacatcagtaagtgaccgggatgagcgagcgaagataacgcatctgcggcgcgaaatatgaagggggagagcccttatagaccaggtagtacacgtttggttagggggcctgcatatggccccctttttcacttttatatctgtgcggtttaatgccgggcagatcacatctccgaggattttagaatggctgaaattaccgcatccctggtaaaagagctgcgtgagcgtactggcgcaggcatgatggattgcaaaaaagcactgactgaagctaacggcgacatcgagctggcaatcgaaaacatgcgtaagtccggtgctattaaagcagcgaaaaaagcaggcaacgttgctgctgacggcgtgatcaaaaccaaaatcgacggcaactacggcatcattctggaagttaactgccagactgacttcgttgcaaaagacgctggtttccaggcgttcgcagacaaagttctggacgcagctgttgctggcaaaatcactgacgttgaagttctgaaagcacagttcgaagaagaacgtgttgcgctggtagcgaaaattggtgaaaacatcaacattcgccgcgttgctgcgctggaaggcgacgttctgggttcttatcagcacggtgcgcgtatcggcgttctggttgctgctaaaggcgctgacgaagagctggttaaacacatcgctatgcacgttgctgcaagcaagccagaattcatcaaaccggaagacgtatccgctgaagtggtagaaaaagaataccaggtacagctggatatcgcgatgcagtctggtaagccgaaagaaatcgcagagaaaatggttgaaggccgcatgaagaaattcaccggcgaagtttctctgaccggtcagccgttcgttatggaaccaagcaaaactgttggtcagctgctgaaagagcataacgctgaagtgactggcttcatccgcttcgaagtgggtgaaggcatcgagaaagttgagactgactttgcagcagaagttgctgcgatgtccaagcagtcttaattatcaaaaaggagccgcctgagggcggcttctttttgtgcccatcttgtaaattcagctaacccttgtggggctgcgctgaaaagcgacgtacaatgtcgctagtattaattcatttcaatcgttgacagtctcaggaaagaaacatggctaccaatgcaaaacccgtctataaacgcattctgcttaagttgagtggcgaagctctgcagggcactgaaggcttcggtattgatgcaagcatactggatcgtatggctcaggaaatcaaagaactggttgaactgggtattcaggttggtgtggtgattggtgggggtaacctgttccgtggcgctggtctggcgaaagcgggtatgaaccgcgttgtgggcgaccacatggggatgctggcgaccgtaatgaacggcctggcaatgcgtgatgcactgcaccgcgcctatgtgaacgctcgtctgatgtccgctattccattgaatggcgtgtgcgacagctacagctgggcagaagctatcagcctgttgcgcaacaaccgtgtggtgatcctctccgccggtacaggtaacccgttctttaccaccgactcagcagcttgcctgcgtggtatcgaaattgaagccgatgtggtgctgaaagcaaccaaagttgacggcgtgtttaccgctgatccggcgaaagatccaaccgcaaccatgtacgagcaactgacttacagcgaagtgctggaaaaagagctgaaagtcatggacctggcggccttcacgctggctcgtgaccataaattaccgattcgtgttttcaatatgaacaaaccgggtgcgctgcgccgtgtggtaatgggtgaaaaagaagggactttaatcacggaataattcccgtgatggataaataagggtaagattccgcgtaagtatcgcgggggcgtaagtctggttataaggcgttattgttgcaggcagtttggtcacggccagcgcgcagcaaccggagcgtacaaaagtacgtgaggatggcgagcactgcccggggccaaaatggcaaataaaatagcctaataatccagacgattacccgtaatatgtttaatcagggctatacttagcacacttccactgtgtgtgactgtctggtctgactgagacaagttttcaaggattcgtaacgtgattagcgatatcagaaaagatgctgaagtacgcatggacaaatgcgtagaagcgttcaaaacccaaatcagcaaaatacgcacgggtcgtgcttctcccagcctgctggatggcattgtcgtggaatattacggcacgccgacgccgctgcgtcagctggcaagcgtaacggtagaagattcccgtacactgaaaatcaacgtgtttgatcgttcaatgtctccggccgttgaaaaagcgattatggcgtccgatcttggcctgaacccgaactctgcgggtagcgacatccgtgttccgctgccgccgctgacggaagaacgtcgtaaagatctgaccaaaatcgttcgtggtgaagcagaacaagcgcgtgttgcagtacgtaacgtgcgtcgtgacgcgaacgacaaagtgaaagcactgttgaaagataaagagatcagcgaagacgacgatcgccgttctcaggacgatgtacagaaactgactgatgctgcaatcaagaaaattgaagcggcgctggcagacaaagaagcagaactgatgcagttctgatttcttgaacgacaaaaacgccgctcagtagatccttgcggatcggctggcggcgttttgctttttattctgtctcaactctggatgtttcatgaagcaactcaccattctgggctcgaccggctcgattggttgcagcacgctggacgtggtgcgccataatcccgaacacttccgcgtagttgcgctggtggcaggcaaaaatgtcactcgcatggtagaacagtgcctggaattctctccccgctatgccgtaatggacgatgaagcgagtgcgaaacttcttaaaacgatgctacagcaacagggtagccgcaccgaagtcttaagtgggcaacaagccgcttgcgatatggcagcgcttgaggatgttgatcaggtgatggcagccattgttggcgctgctgggctgttacctacgcttgctgcgatccgcgcgggtaaaaccattttgctggccaataaagaatcactggttacctgcggacgtctgtttatggacgccgtaaagcagagcaaagcgcaattgttaccggtcgatagcgaacataacgccatttttcagagtttaccgcaacctatccagcataatctgggatacgctgaccttgagcaaaatggcgtggtgtccattttacttaccgggtctggtggccctttccgtgagacgccattgcgcgatttggcaacaatgacgccggatcaagcctgccgtcatccgaactggtcgatggggcgtaaaatttctgtcgattcggctaccatgatgaacaaaggtctggaatacattgaagcgcgttggctgtttaacgccagcgccagccagatggaagtgctgattcacccgcagtcagtgattcactcaatggtgcgctatcaggacggcagtgttctggcgcagctgggggaaccggatatgcgtacgccaattgcccacaccatggcatggccgaatcgcgtgaactctggcgtgaagccgctcgatttttgcaaactaagtgcgttgacatttgccgcaccggattatgatcgttatccatgcctgaaactggcgatggaggcgttcgaacaaggccaggcagcgacgacagcattgaatgccgcaaacgaaatcaccgttgctgcttttcttgcgcaacaaatccgctttacggatatcgctgcgttgaatttatccgtactggaaaaaatggatatgcgcgaaccacaatgtgtggacgatgtgttatctgttgatgcgaacgcgcgtgaagtcgccagaaaagaggtgatgcgtctcgcaagctgaggataatccggctacagagagtcgcgctatttgttagcgtagggcttcagtgatatagtctgcgccatctgatcgtaagtagttggctttataaggtcagatatgccgtggttttacacggcttttttttgtataggcttcagtattcctgagtaccgtaaaccctgtcagggaataaaaaacgcgtgatgttgtctgctactcaaccacttagcgaaaaattgccagcgcatggctgccgtcatgttgcgatcattatggacggcaatggccgctgggcaaaaaagcaagggaagattcgtgcctttgggcataaagccggggcaaaatccgtccgccgggctgtctcttttgcggccaacaacggtattgaggcgttaacgctgtatgcctttagtagtgaaaactggaaccgaccagcgcaggaagtcagtgcgttaatggaactgtttgtgtgggcgctcgatagcgaagtaaaaagtctgcaccgacataacgtgcgtctgcgtattattggcgataccagtcgctttaactcgcgtttgcaagaacgtattcgtaaatctgaagcgctaacagccgggaataccggtctgacgctgaatattgcggcgaactacggtggacgttgggatatagtccagggagtcaggcaactggctgaaaaggtgcagcaaggaaacctgcaaccagatcagatagatgaagagatgctaaaccagcatgtctgtatgcatgaactggcccctgtagatttagtaattaggactgggggggagcatcgcattagtaactttttgctttggcaaattgcctatgccgaactttactttacagatgttctctggcccgatttcgatgaacaagactttgaaggggcgttaaatgcctttgctaatcgagagcgtcgtttcggcggcaccgagcccggtgatgaaacagcctgatgggggtcgcttttgctgaagtatcgcctgatatctgcttttgtgttaatacccgtcgtcatcgcggcgttgtttctgttgccgccggtggggttcgccattgtaacgctggtggtctgcatgctggcagcgtgggaatggggacagcttagcggttttaccactcgttcgcagcgagtatggttggcggtgttatgcgggttattgttggcgctgatgctttttctgttgccggaatatcaccgaaatattcatcaaccgctggttgaaatctcactttgggcttcgctgggttggtggattgtcgcgctattgctggtgctgttttacccaggttccgcagcaatctggcgtaactctaaaacattgcgccttatttttggcgtgctaaccattgttcccttcttctggggcatgctggcgttacgggcctggcactatgacgagaatcattacagtggcgcaatatggctgctctatgtcatgatcctggtatggggcgctgactccggcgcatatatgtttggcaaattgtttggtaaacataagctggcaccgaaggtttctccgggtaaaacctggcaaggctttatcggtggactcgctactgcagcggtaatctcatggggttatggcatgtgggcgaatctcgacgtcgctcccgtcaccttactcatttgctctattgtcgcagcgttagcctcagtgctcggcgatctgaccgagagtatgtttaagcgtgaagcaggaattaaggacagcggtcatttaattccaggacacggtggtattttagatcgtattgatagcctgacggctgcggtaccggtctttgcttgcttgttgttactggtattcaggacgctttaacggaaggtaatatgctgagttttctctgggatttggcttcgttcatcgttgcactgggtgtacttatcaccgtgcatgaatttggtcatttctgggttgcccggcgttgtggtgttcgcgttgagcgtttctcaatagggtttggtaaggcgctctggcggcgaactgataagctcggcaccgaatatgttatcgccctgatcccgttgggcggttatgtcaaaatgctggatgagcgcgcagaaccggtcgttccggaactccgccaccatgccttcaataataaatctgtcggccaacgagcggcgattattgccgcaggtccggttgcaaacttcatttttgctatctttgcctactggctggtttttattattggtgtgcctggcgtacgtccggtggttggcgaaatagcagccaattcgatagctgcggaagcacaaattgcaccaggtacggaactaaaagccgtagatggtatcgaaacgcctgattgggatgccgtgcgtttgcagttggtcgataaaattggcgatgaaagcaccaccattacagtagcgccatttggcagcgaccaacggcgggatgtaaagctcgatttacgtcactgggcgtttgagcctgataaagaagatccggtatcttcgctggggattcgtcctcgtgggccgcaaattgaacctgtactggaaaatgtgcagccaaactcggcggcaagcaaggcaggtttgcaagcaggcgacaggatcgttaaagtcgatggtcagcccttaacgcagtgggtgacctttgtgatgcttgtccgggataacccgggtaaatccttagcgttagaaatcgaaaggcaggggagtcccttgtctttgacattaatcccggagagtaaaccgggtaatggtaaagcgattggttttgtcggtattgagccgaaagtcattcctttgccagatgagtataaagttgtacgccagtatgggccgttcaacgccatcgtcgaagccacggacaaaacgtggcagctgatgaagctgacggtcagtatgctgggaaaattgatcaccggtgatgtgaaactgaacaacctcagtgggccgatctctatcgccaagggggctgggatgacagcggaactcggggttgtttattacctgccgtttcttgcgcttattagcgtgaacttagggataattaacctgtttccgttgcccgtacttgacggggggcatctgctgttccttgcgatcgaaaagatcaagggcggaccggtatccgagcgggttcaagacttttgttatcgcattggctcgattctgctggtgctgttaatggggcttgcacttttcaatgatttctctcggttatgagagttagttaggaagaacgcataataacgatggcgatgaaaaagttgctcatagcgtcgctgctgtttagcagcgccaccgtatacggtgctgaagggttcgtagtgaaagatattcatttcgaaggccttcagcgtgtcgccgttggtgcggccctcctcagtatgccggtgcgcacaggcgacacggttaatgatgaagatatcagtaataccattcgcgctctgtttgctaccggcaactttgaggatgttcgcgtccttcgtgatggtgatacccttctggttcaggtaaaagaacgtccgaccattgccagcattactttctccggtaacaaatcggtgaaagatgacatgctgaagcaaaacctcgaggcttctggtgtgcgtgtgggcgaatccctcgatcgcaccaccattgccgatatcgagaaaggtctggaagacttctactacagcgtcggtaaatatagcgccagcgtaaaagctgtcgtgaccccgctgccgcgcaaccgtgttgacctaaaactggtgttccaggaaggtgtgtcagctgaaatccagcaaattaacattgttggtaaccatgctttcaccaccgacgaactgatctctcatttccaactgcgtgacgaagtgccgtggtggaacgtggtaggcgatcgtaaataccagaaacagaaactggcgggcgaccttgaaaccctgcgcagctactatctggatcgcggttatgcccgtttcaacatcgactctacccaggtcagtctgacgccagataaaaaaggtatttacgtcacggtgaacatcaccgaaggcgatcagtacaagctttctggcgttgaagtgagcggcaaccttgccgggcactccgctgaaattgagcagctgactaagatcgagccgggtgagctgtataacggcaccaaagtgaccaagatggaagatgacatcaaaaagcttctcggtcgctatggttatgcctatccgcgcgtacagtcgatgcccgaaattaacgatgccgacaaaaccgttaaattacgtgtgaacgttgatgcgggtaaccgtttctacgtgcgtaagatccgttttgaaggtaacgatacctcgaaagatgccgtcctgcgtcgcgaaatgcgtcagatggaaggtgcatggctggggagcgatctggtcgatcagggtaaggagcgtctgaatcgtctgggcttctttgaaactgtcgataccgatacccaacgtgttccgggtagcccggaccaggttgatgtcgtctacaaggtaaaagagcgcaacaccggtagcttcaactttggtattggttacggtactgaaagtggcgtgagcttccaggctggtgtgcagcaggataactggttaggtacaggttatgctgttggtatcaacgggaccaaaaacgattaccagacctatgctgaactgtcggtaaccaacccgtacttcaccgtagatggcgtaagcctcggtggtcgtctcttctataatgacttccaggcagatgacgccgacctgtccgactataccaacaagagttatggtacagacgtgacgttgggcttcccgattaacgaatataactcgctgcgtgcaggtctgggttatgtacataactccctgtccaacatgcagcctcaggttgcgatgtggcgttatctgtactctatgggtgaacatccgagcacctctgatcaggataacagcttcaaaacggacgacttcacgttcaactatggttggacctataacaagcttgaccgtggttacttcccgacagatggttcacgtgtcaacctgaccggtaaagtgaccattcctggatcggataacgaatactacaaagtgacgttagacacggcgacttatgtgccgatcgatgacgatcacaaatgggttgttctggggcgtacccgctggggttatggtgatggtttaggcggcaaagagatgccgttctacgagaacttctatgccggtggttccagcaccgtgcgtggcttccagtccaataccattggtccgaaagcagtttacttcccgcatcaggccagtaattatgatccggactatgattacgaatgtgcgactcaggacggcgcgaaagacctgtgtaaatcggatgatgctgtaggcggtaacgccatggcggttgccagcctcgagttcatcaccccgacgccgtttattagcgataagtatgctaactcggttcgtacttccttcttctgggatatgggtaccgtttgggatacaaactgggattccagccaatattctggatatccggactatagtgatccaagcaatatccgtatgtctgcgggtatcgcattacaatggatgtccccattggggccgttggtgttctcctacgcccagccgttcaaaaagtacgatggagacaaggcagaacagttccagtttaacatcggtaaaacctggtaagtgttctccacaaaggaatgtagtggtagtgtagcgatgactttaggcgatcaatataagatcgccgggccacgcaaagaactgcaccctccggtgcaaatgggatggtaaggagtttattgtgaaaaagtggttattagctgcaggtctcggtttagcactggcaacttctgctcaggcggctgacaaaattgcaatcgtcaacatgggcagcctgttccagcaggtagcgcagaaaaccggtgtttctaacacgctggaaaatgagttcaaaggccgtgccagcgaactgcagcgtatggaaaccgatctgcaggctaaaatgaaaaagctgcagtccatgaaagcgggcagcgatcgcactaagctggaaaaagacgtgatggctcagcgccagacttttgctcagaaagcgcaggcttttgagcaggatcgcgcacgtcgttccaacgaagaacgcggcaaactggttactcgtatccagactgctgtgaaatccgttgccaacagccaggatatcgatctggttgttgatgcaaacgccgttgcttacaacagcagcgatgtaaaagacatcactgccgacgtactgaaacaggttaaataagtaatgccttcaattcgactggctgatttagcgcagcagttggatgcagaactacacggtgatggcgatatcgtcatcaccggcgttgcgtccatgcaatctgcacaaacaggtcacattacgttcatggttaacccaaaataccgtgagcatttaggcttgtgccaggcgtccgcggttgtcatgacccaggacgatcttcctttcgcgaaaagtgccgcactggtagtgaagaatccctacctgacttacgcgcgcatggcgcaaattttagataccacgccgcagcccgcgcagaacattgcacccagtgcggtgatcgacgcgacggcgaagctgggtaacaacgtatcgattggcgctaacgcggtgattgagtccggcgttgaactgggcgataacgtgattatcggtgccggttgcttcgtaggtaaaaacagcaaaatcggtgcaggttcgcgtctctgggcgaacgtaaccatttaccatgagatccagatcggtcagaattgcctgatccagtccggaacagtggtaggcgcagacggctttggttatgccaacgatcgtggtaactgggtgaagatcccacagattggtcgcgtaattattggcgatcgcgtggagatcggtgcctgcacaaccatcgatcgcggcgcgctggatgacactattattggcaatggcgtgatcattgataaccagtgccagattgcacataacgtcgtgattggcgacaatacggcggttgccggtggcgtcattatggcgggcagcctgaaaattggtcgttactgcatgatcggcggagccagcgtaatcaacgggcatatggaaatatgcgacaaagtgacggttacgggcatgggtatggtgatgcgtcccatcactgaaccaggcgtctattcctcaggcattccgctgcaacccaacaaagtctggcgcaaaaccgctgcactggtgatgaacattgatgacatgagcaagcgtctgaaatcgcttgagcgcaaggttaatcaacaagactaacgttccatcttttgttcgccaaactttacggcctgtctcattcttacgattgcggcaggccgtgttattattgtcgtttcttatattttgacaggaagagtatcttgactactaacactcatactctgcagattgaagagattttagaacttctgccgcaccgtttcccgttcttactggtggatcgcgtgctggattttgaagaaggtcgttttctgcgcgcagtaaaaaatgtctctgtcaatgagccattcttccagggccatttccctggaaaaccgattttcccgggtgtgctgattctggaagcaatggcacaggcaacaggtattctggcgtttaaaagcgtaggaaaactggaaccgggtgagctgtactacttcgctggtattgacgaagcgcgcttcaagcgcccggtcgtgcctggcgatcaaatgatcatggaagtcactttcgaaaaaacgcgccgcggcctgacccgttttaaaggggttgctctggtcgatggtaaagtagtttgcgaagcaacgatgatgtgtgctcgtagccgggaggcctgatacgtgattgataaatccgcctttgtgcatccaaccgccattgtggaagagggcgcgtcaattggcgcgaacgcacacattggtcctttttgtatcgttggaccccatgtcgaaattggtgagggtaccgtactgaaatctcacgttgtcgtgaatggtcatactaaaattggccgcgataatgagatttatcagttcgcctccatcggcgaagttaaccaggatctgaaatatgctggcgaaccgacccgtgtggaaatcggcgatcgtaaccgcattcgcgaaagcgtcaccattcatcgtggcacagtccagggcggtggattgacgaaggtgggcagcgacaacttactgatgatcaacgcgcacattgcgcacgattgtacggtaggtaaccgctgtattctcgccaacaacgcaacgctggcgggtcacgtatcggttgacgacttcgcgatcatcggcggcatgaccgcagtccatcagttctgcatcattggtgcgcacgtgatggttggcggctgctccggtgtggcgcaggacgtccctccttatgtcattgcgcagggtaaccacgcaacgccgttcggtgtcaatatcgaagggctgaagcgccgcggattcagccgtgaggcgattaccgctatccgcaatgcgtataagctgatttatcgtagcggtaaaacgctcgatgaagtgaaaccggaaattgctgaactggcggaaacatatccggaagtgaaagcctttaccgatttctttgcacgctcaacgcgcggtctgattcgttaatgactgaacagcgtccattaacgattgccctggtcgccggagaaacctccggcgatatcctgggggccggtttaatccgcgctctgaaagaacatgtgcccaacgcccgctttgttggtgttgccgggccacgaatgcaggctgaaggctgcgaagcctggtacgaaatggaagaactggcggtgatgggcattgttgaagtgctcggtcgtctgcgtcgcttactgcatattcgtgccgatctgacaaagcgttttggcgaactgaagccagatgtttttgttggtattgatgcgcctgacttcaatattactcttgaaggtaacctcaaaaagcagggtatcaaaaccattcattacgtcagtccgtcagtctgggcgtggcgacagaaacgtgttttcaaaataggcagagccaccgatctggtgctcgcatttctgcctttcgaaaaagcgttttatgacaaatacaacgtaccgtgccgctttatcggtcataccatggctgatgccatgccattagatccagataaaaatgccgcccgtgatgtgctggggatccctcacgatgcccactgcctggcgttgctaccggggagccgtggtgcagaagttgaaatgcttagtgccgatttcctgaaaacggcccagcttttgcgccagacatatccggatctcgaaatcgtggtgccactggtgaatgccaaacgccgcgagcagtttgaacgcatcaaagctgaagtcgcgccagacctttcagttcatttgctggatgggatgggccgtgaggcgatggtcgccagcgatgcggcgctactggcgtcgggtacggcagccctggagtgtatgctggcgaaatgcccgatggtggtgggatatcgcatgaagccttttaccttctggttggcgaagcggctggtgaaaactgattatgtctcgctgccaaatctgctggcgggcagagagttagtcaaagaattattgcaggaagagtgtgagccgcaaaaactggctgcggcgctgttaccgctgttggcgaacgggaaaaccagccacgcgatgcacgataccttccgtgaactgcatcagcagatccgctgcaatgccgatgagcaggcggcacaagccgttctggagttagcacaatgatcgaatttgtttatccgcacacgcagctggttgcgggtgtggatgaagtcggacgcgggccgttagttggcgcggtcgtcaccgctgcggtgatccttgacccggcgcgcccgattgccgggctgaatgattccaaaaagctgagcgaaaaacgccgtctggcgctctatgaagagatcaaagagaaagcgttgagctggagtctgggccgcgcggaaccccacgaaatcgacgagctgaacattcttcatgcgaccatgctggcgatgcagcgtgccgtcgctgggctgcatattgcgccggaatatgtgttgattgatggtaaccgctgcccgaaattaccgatgcctgcgatggctgtggtgaaaggcgatagccgcgtaccggaaatcagtgccgcgtctatcctggcgaaagtgacgcgtgacgccgaaatggcggcgctggatattgttttcccgcaatatggttttgcccaacacaaagggtacccaaccgcttttcatctggaaaaactggctgaacacggcgcgaccgaacaccatcggcgcagctttgggcctgtcaaacgcgcactgggacttgcgtcctgattcttgtgtcgagattaagtaaaccggaatctgaagatgtctgaaccacgtttcgtacacctgcgggtgcacagcgactactcgatgatcgatggcctggccaaaaccgcaccgttggtaaaaaaggcggcggcgttgggtatgccagcactggcgatcaccgatttcaccaacctttgtggtctggtgaagttctacggagcgggacatggcgcagggattaagcctatcgtcggggcagattttaacgtccagtgcgacctgctgggtgatgagttaacccacctgacggtactggcggcgaacaataccggctatcagaatctgacgttgctgatctcaaaagcgtatcagcgcgggtacggtgccgccgggccgatcatcgatcgcgactggcttatcgaattaaacgaagggttgatccttctttccggcggacgcatgggcgacgtcggacgcagtcttttgcgtggtaacagcgcgctggtagatgagtgtgtcgcgttttatgaagaacacttcccggatcgctattttctcgagctgatccgcaccggcaggccggatgaagaaagctatctgcacgcggcggtggaactggcggaagcgcgcggtttgcccgtcgtggcgaccaacgacgtgcgctttatcgacagcagcgactttgacgcacacgaaatccgcgtcgcgatccacgacggctttaccctcgacgatcctaaacgcccgcgtaactattcgccgcagcaatatatgcgtagcgaagaggagatgtgtgagctgtttgccgacatccccgaagcccttgccaacaccgttgagatcgccaaacgctgtaacgtaaccgtgcgtcttggtgaatacttcctgccgcagttcccgaccggggacatgagcaccgaagattatctggtcaagcgtgcaaaagagggcctggaagagcgtctggcctttttattccctgatgaggaagaacgtcttaagcgccgcccggaatatgacgaacgtctggagactgaacttcaggttatcaaccagatgggcttcccgggctacttcctcatcgttatggaatttatccagtggtcgaaagataacggcgtaccggtagggccaggccgtggctccggtgcgggttcactggtggcctacgcgctgaaaatcaccgacctcgatccgctggaatttgacctgctgttcgaacgtttccttaacccggaacgtgtctccatgcctgacttcgacgttgacttctgtatggagaaacgcgatcaggttatcgagcacgtagcggacatgtacggtcgtgatgcggtatcgcagatcatcaccttcggtacaatggcggcgaaagcggtgatccgcgacgtaggccgcgtgctggggcatccgtacggctttgtcgatcgtatctcgaaactgatcccgcccgatccggggatgacgctggcgaaagcgtttgaagccgagccgcagctgccggaaatctacgaagcggatgaagaagttaaggcgctgatcgacatggcgcgcaaactggaaggggtcacccgtaacgccggtaagcacgccggtggggtggttatcgcgccgaccaaaattaccgattttgcgccgctttactgcgatgaagagggcaaacatccggtcacccagtttgataaaagcgacgttgaatacgccggactggtgaagttcgacttccttggtttgcgtacgctcaccatcatcaactgggcgctggagatgatcaacaagcggcgggcgaagaatggcgagccgccgctggatatcgctgcgatcccgctggatgataagaaaagcttcgacatgctgcaacgctcggaaaccacggcggtattccagcttgaatcgcgcggcatgaaggacctgatcaagcgtctacaacctgactgcttcgaagatatgatcgccctagtggcactgttccgccccggtccgttgcaatcagggatggtggataactttatcgaccgtaaacatggtcgtgaagagatctcctatccggacgtacagtggcagcatgaaagcctgaaaccggtactggagccaacctacggcattatcctgtatcaggaacaggtcatgcagattgcgcaggtgctttctggttataccctcggtggcgcggatatgctgcgtcgtgcgatgggtaagaaaaagccggaagagatggctaagcaacgttctgtatttgctgaaggtgcagaaaagaacggaatcaacgctgaactggcgatgaaaatcttcgacctggtggagaaattcgctggttacggatttaacaaatcgcactctgcggcctatgctttggtgtcatatcaaacgttatggctgaaagcgcactatcctgcggagtttatggcggcggtaatgaccgccgatatggacaacaccgagaaggtggtgggtctggtggatgagtgctggcggatggggctgaaaatcctgccaccagatataaactccggtctttaccatttccacgtcaacgacgacggcgaaatcgtgtatggtattggcgcgatcaaaggggtcggtgaaggtccgattgaggccatcatcgaagcccgtaataaaggcggctacttccgcgaactgtttgatctctgcgcccgtaccgacaccaaaaagttgaaccgtcgcgtgctggaaaaactgatcatgtccggggcgtttgaccgtcttgggccacatcgcgcagcgctgatgaactcgctgggcgatgcgttaaaagcggcagatcaacacgcgaaagcggaagctatcggtcaggccgatatgttcggcgtgctggccgaagagccggaacaaattgaacaatcctacgccagctgccaaccgtggccggagcaggtggtattagatggggaacgtgaaacgttaggcctgtacctgaccggacaccctatcaaccagtatttaaaagagattgagcgttatgtcggaggcgtaaggctgaaagacatgcacccgacagaacgtggtaaagtcatcacggctgcggggctcgttgttgccgcgcgggttatggtcaccaagcgcggcaatcgtatcggtatctgcacgctggatgaccgttccgggcggctggaagtgatgttgtttactgacgccctggataaataccagcaattgctggaaaaagaccgcatacttatcgtcagcggacaggtcagctttgatgacttcagcggtgggcttaaaatgaccgctcgcgaagtgatggatattgacgaagcccgggaaaaatatgctcgcgggcttgctatctcgctgacggacaggcaaattgatgaccagcttttaaaccgactccgtcagtctctggaaccccaccgctctgggacaattccagtacatctctactatcagagggcggatgcacgcgcgcggttgcgttttggcgcgacgtggcgtgtctctccgagcgatcgtttattaaacgatctccgtggcctcattggttcggagcaggtggaactggagtttgactaatacaggaatactatgagtctgaatttccttgattttgaacagccgattgcagagctggaagcgaaaatcgattctctgactgcggttagccgtcaggatgagaaactggatattaacatcgatgaagaagtgcatcgtctgcgtgaaaaaagcgtagaactgacacgtaaaatcttcgccgatctcggtgcatggcagattgcgcaactggcacgccatccacagcgtccttataccctggattacgttcgcctggcatttgatgaatttgacgaactggctggcgaccgcgcgtatgcagacgataaagctatcgtcggtggtatcgcccgtctcgatggtcgtccggtgatgatcattggtcatcaaaaaggtcgtgaaaccaaagaaaaaattcgccgtaactttggtatgccagcgccagaaggttaccgcaaagcactgcgtctgatgcaaatggctgaacgctttaagatgcctatcatcacctttatcgacaccccgggggcttatcctggcgtgggcgcagaagagcgtggtcagtctgaagccattgcacgcaacctgcgtgaaatgtctcgcctcggcgtaccggtagtttgtacggttatcggtgaaggtggttctggcggtgcgctggcgattggcgtgggcgataaagtgaatatgctgcaatacagcacctattccgttatctcgccggaaggttgtgcgtccattctgtggaagagcgccgacaaagcgccgctggcggctgaagcgatgggtatcattgctccgcgtctgaaagaactgaaactgatcgactccatcatcccggaaccactgggtggtgctcaccgtaacccggaagcgatggcggcatcgttgaaagcgcaactgctggcggatctggccgatctcgacgtgttaagcactgaagatttaaaaaatcgtcgttatcagcgcctgatgagctacggttacgcgtaattcgcaaaagttctgaaaaagggtcacttcggtggcccttttttatcgccacggtttgagcaggctatgattaaggaaggattttccaggaggaacacatgaacatcattgccattatgggaccgcatggcgtcttttataaagatgagcccatcaaagaactggagtcggcgctggtggcgcaaggctttcagattatctggccacaaaacagcgttgatttgctgaaatttatcgagcataaccctcgaatttgcggcgtgatttttgactgggatgagtacagtctcgatttatgtagcgatatcaatcagcttaatgaatatctcccgctttatgccttcatcaacacccactcgacgatggatgtcagcgtgcaggatatgcggatggcgctctggttttttgaatatgcgctggggcaggcggaagatatcgccattcgtatgcgtcagtacaccgacgaatatcttgataacattacaccgccgttcacgaaagccttgtttacctacgtcaaagagcggaagtacaccttttgtacgccggggcatatgggcggcaccgcatatcaaaaaagcccggttggctgtctgttttatgattttttcggcgggaatactcttaaggctgatgtctctatttcggtcaccgagcttggttcgttgctcgaccacaccgggccacacctggaagcggaagagtacatcgcgcggacttttggcgcggaacagagttatatcgttaccaacggaacatcgacgtcgaacaaaattgtgggtatgtacgccgcgccatccggcagtacgctgttgatcgaccgcaattgtcataaatcgctggcgcatctgttgatgatgaacgatgtagtgccagtctggctgaaaccgacgcgtaatgcgttggggattcttggtgggatcccgcgccgtgaatttactcgcgacagcatcgaagagaaagtcgctgctaccacgcaagcacaatggccggttcatgcggtgatcaccaactccacctatgatggcttgctctacaacaccgactggatcaaacagacgctggatgtcccgtcgattcacttcgattctgcctgggtgccgtacacccattttcatccgatctaccagggtaaaagtggtatgagcggcgagcgtgttgcgggaaaagtgatcttcgaaacgcaatcgacccacaaaatgctggcggcgttatcgcaggcttcgctgatccacattaaaggcgagtatgacgaagaggcctttaacgaagcctttatgatgcataccaccacctcgcccagttatcccattgttgcttcggttgagacggcggcggcgatgctgcgtggtaatccgggcaaacggctgattaaccgttcagtagaacgagctctgcattttcgcaaagaggtccagcggctgcgggaagagtctgacggttggtttttcgatatctggcaaccgccgcaggtggatgaagccgaatgctggcccgttgcgcctggcgaacagtggcacggctttaacgatgcggatgccgatcatatgtttctcgatccggttaaagtcactattttgacaccggggatggacgagcagggcaatatgagcgaggaggggatcccggcggcgctggtagcaaaattcctcgacgaacgtgggatcgtagtagagaaaaccggcccttataacctgctgtttctctttagtattggcatcgataaaaccaaagcaatgggattattgcgtgggttgacggaattcaaacgctcttacgatctcaacctgcggatcaaaaatatgctacccgatctctatgcagaagatcccgatttctaccgcaatatgcgtattcaggatctggcacaagggatccataagctgattcgtaaacacgatcttcccggtttgatgttgcgggcattcgatactttgccggagatgatcatgacgccacatcaggcatggcaacgacaaattaaaggcgaagtagaaaccattgcgctggaacaactggtcggtagagtatcggcaaatatgatcctgccttatccaccgggcgtaccgctgttgatgcctggagaaatgctgaccaaagagagccgcacagtactcgattttctactgatgctttgttccgtcgggcaacattaccccggttttgaaacggatattcacggcgcgaaacaggacgaagacggcgtttaccgcgtacgagtcctaaaaatggcgggataacttgccagagcggcttccgggcgagtaacgtgctgttaacaaataaaggagacgttatgctgggtttaaaacaggttcaccatattgcgattattgcgacggattatgcggtgagcaaagctttctactgcgatattcttggtttcacgctgcaaagcgaagtctatcgcgaagcgcgcgactcatggaaaggggatttggcgcttaatgggcaatatgtgattgagcttttctcatttccgttcccgccggaacgacccagccgaccggaagcttgcggtctgcgtcatctggcttttagcgttgatgacatcgatgcggcagtggcgcaccttgaaagccataacgtgaagtgtgaaaccatccgtgtcgatccatacacgcaaaaacgcttcaccttctttaacgatccggacgggctgccgttggaactgtatgagcagtaaggcttgtcatcgccgcatttgcccggtaacgtgccgggcattgctactgtaaaatcgcaccatcatgacactcacgctcaatagacaacttctcacctcacgccagattctggtggcctttagcggcgggcttgactccaccgttctgctgcatcagttggtgcagtggcggacggaaaatccgggtgtcgctctgcgcgctattcatgtgcatcacggtttaagtgccaatgccgatgcctgggttacgcattgcgaaaacgtctgccaacagtggcaggtgccgctggtggtcgaacgcgtacaacttgcgcaagaaggactgggcattgaggcccaggcgcggcaggcacgttatcaggcatttgcccgcaccttgttgcccggtgaagtgctggtcaccgcgcaacatctcgacgatcaatgtgaaacctttctgctggcgctaaaacgcggcagtggccctgccgggctttcggctatggcggaagtctcggagtttgccggaacgcggcttattcgcccgttgctcgcccgcacgcggggggaactggtgcagtgggcgcgtcagtatgatttacgctggattgaagacgaaagtaatcaggacgactcatacgatcgtaactttctgcgcctgcgcgtagtgccgttattgcagcagcgttggccgcattttgccgaagcaacggcccgcagcgccgcactttgtgctgaacaagagagcctgctggatgaactgctggcagatgatttagcacactgtcaatcgccgcaggggacgctgcagattgtgccaatgctggcgatgagtgatgcccgccgcgcggcgattatccgccgctggctggcagggcagaatgcaccgatgccttcccgcgacgcgttggtgaggatctggcaggaagtggcgctggcgcgggaagatgcctcaccctgtttacgtttgggcgcgtttgaaatccgacgctatcagtcgcaactgtggtggattaaatccgtcaccgggcaaagcgaaaacattgtgccgtggcagacgtggcttcaaccgctggaattaccggcggggctgggaagtgtacagcttaatgcgggaggcgatattcgccctccgcgtgcagacgaagcggtcagcgtgcgtttcaaagcgccaggattgctgcatattgtcgggcgtaacggcggacgtaagctaaagaaaatctggcaagagctgggcgtgccgccgtggctacgtgacaccacgccactgctgttttatggcgaaacgctgattgcggcggcaggggtatttgtgacgcaagaaggtgtggctgaaggtgagaatggcgtaagttttgtctggcagaaaacgcttagttaagtgaaagccggataagacgcatcaaacgtcgcatccggcgaaagtcaatcaggattcgcttaccaccaccgtaccgatttccgggtggctaaagctggtaattttatccagacgcagctcgcgggtttcgccagcggcctcgacgaccaggtactccacatttttgcgggagactaaatcactggcttttgcctgcaatttttcgccatctttcagctcaagtgtcagcattaaatgatgctggcaggcgagctcaagattatcgtaatcatcacaattgattggttgatacgtatcattcattgacataatcgctcaccagtaagtttgccgcagcgtatgctgctttttccctgacagcctcagaaagggcgtcgtcggcagccatttcattcagcactttcaaaacgcagcccagcgcgtccggaacgtatcctaagtctccgctggcgatttccgcgtaccgcttgcgtattaactcacaatatttttccacatgccctcctgtcagcactctgacttaaccgtggatgcaagtctaagcctacgaagataaactctgtttcgcaaggtgactataccacactcatttctgcaatatcagcgccgcaactgcacgtattccgttacaatggcctcctgattcgaaaggagttttcttatggcgcttaaagcgacaatttataaagcgacggttaatgtggccgatctcgaccgcaaccagtttctcgatgcctctctgacgctggcgcgccatccttcagaaacccaggagcgtatgatgctgcgcttgctggcgtggctgaaatatgctgatgaacgtctgcaatttacccgtggtttgtgtgccgatgatgagccggaagcgtggctgcgtaacgatcacctgggcattgatttgtggattgagctggggctgccggatgagcggcggattaagaaagcctgcacccaggccgcagaagtggcgctgtttacctataatagtcgggcggcgcaaatctggtggcagcaaaatcagagcaaatgtgtgcagtttgccaatctttccgtctggtatctggacgatgaacaactggcgaaagtaagcgcctttgccgatcgtaccatgacgctgcaggcaacgattcaggatggcgtgatctggttatcggatgataagaataatctggaagtgaacttaaccgcctggcaacaaccttcatgattgtgatttcccgacatgttgctattcccgatggtgagcttgagatcaccgccattcgtgcgcagggcgcgggcgggcagcatgttaataagacctcaacggctattcatctgcgttttgacattcgggcgtccagcctgccagagtattacaaagagcgtctgctcgccgccagccatcatttgatcagcagtgatggcgtgattgtcattaaggcacaggaataccgcagtcaggaactgaaccgcgaagcagctctggcccggctggtggctatgattaaagaattaacaacagaaaaaaaagcccgacgacccacgcggcccacccgtgcatcgaaagagcgcaggctggcatcgaaagcacaaaaatcaagcgtgaaggcgatgcgcggcaaagtgcgcagcggtcgggaataaaaagaaggaatggatggtgaaaaaagcgatagtgacagcgatggctgtaatcagcctctttactctgatgggatgtaataatcgggccgaagtcgatacgctttctccggcgcaggctgccgaactgaaaccgatgccgcaaagttggcgcggcgtgctgccgtgtgccgattgcgaaggaatcgaaacctctctgttcctcgaaaaagacggaacatgggtgatgaatgagcgttatctcggtgctcgtgaagaaccttcctccttcgcttcctacggtacatgggcgcgaaccgctgacaagctggtattaaccgacagcaaaggtgaaaagtcatattatcgggcgaaaggcgatgcgctggagatgctcgatcgtgaaggcaatccgattgaatcgcagttcaactatacgctggaagcggcacaatccagtttacctatgacgccgatgaccctgcggggcatgtatttttatatggctgatgcggcgaccttcactgattgcgcgaccggaaaacgtttcatggtagcgaataacgcagagctggagcgtagctacctggctgcgcgcggtcacagtgaaaaaccggtgttactgtcagtagaaggtcactttacgcttgagggtaatccggataccggtgcgccgactaaagtattggcacccgatacggcagggaaattttaccccaaccaggattgcagtagtttggggcagtaacccgtcttgagacagaaacaaacgcaaaacaggccagaaggatatatttcaacattttgaatttgcacgttttttgtaggccggataaggcgtttacgccgcatccggcaatggtgctcaacgcctgatgcgacgctggcgcgtcttatcatgcctacaacccccctcataccttaaggcggataaggcatttactttatcaccgggtcaaaccaacaaagcgacccgccttgatataaatcccaggcttcaggtgcccaacatactgtaactgcgtttctggcttaaacgcagagacatcaccaatacgcatatgcatcagatcggcagggctaatccagcccgattgcgccagtgtaagtggatgcccggctttggcaaaggcatccgtgacaaattccgaacaaaaccacgactttttgtctccttcgcccacactgcttaactgcgctttcgccaggccgctgacgcactgttggcgaaaatcctcggagaacggattcagtgagcacatctggcgagtcaccataaagggaataaattcgacaatgccgcgatagttataaccgctatctttgattttattggcaaacgcggtgatatctgtggcttgttgcggggtaagatccgggactcgtaagacgaaaagcttatcactatgcttcatcgcttttttaagggaaacgatctggacgccagcgcctgtcgcttctgcaacgttattatcacccagaaagattgcaacgtgactcacagaggaagtgctgaagacgcggattccaaatgaggttaccccaaggcttgaggagaacagcaaatcgccgggtttgagatcaggtgccgttatttcttttattgattgttcggtgaaagagctttgatgctggaatttgacagcccatgtttttgcctcggcatctactgctgtggctgatgggtctggctggctgatatcaacggtacaagccgaaagtaaaagaaagctggggagaaacaggcggcagtacgcctttggtttatccattttatacaatccatgtaaaaaaagggccctgaaattcaggaccctttctggcatcagcctttaatctgtttcaccagatattcgacgatgtcaccagtcttaattaactgtttctcgccgttgcgacgatatttatattcgatatcgtcgttgtcgaggttacggtcgcccagcacaatagtgtgcggaataccgatcagttccatatcagcaaacatcacgcccggacgctctttgcggtcatccagcagcacttcgataccttgtgcacgcagttcgctgtacagtttctcagcaagctcttgtacgcggaaggatttgtgcatgttcatcggcagaatcgccacctggaacggcgcgatagcgtcaggccatacgatgcctcgttcgtcgtagttctgctcaatcgccgcagctaccacacgcgttaccccgataccgtagcaacccatcgtcaggatttggttacggccatcttcaccctgtacggaggctttcagtgcttcggagtacttggtacccagctggaagatgtgaccaacttcgataccacgtttgatcagcagcctaccctggccatccgggcttggatcgccagccaccacgttacggatatctgcaacttccggggtagcgacatcgcgatcccagttgatgccgaagtagtgtttaccatcgatgttagcaccagcagcgaaatcactcatcgccgcaacggtacggtcaatcaccaccggaatcggcatgtttaccggacccagtgaacccggaccggctttaaccacggcacgaatttcttcttcggtcgcgaaagtcagcgggcttgcaacctgcggcagtttttctgctttaacttcgttcagctcgtgatcaccgcgcaccagcagcgcaacctgcgggaagctgctgccttcaaccgctttaaccagcagagtcttaaccgttttctcaatcggcagattgaactgttcaaccagttccgcgatggttttcgcgttcggcgtatcaaccagcgtcatttcctgggtagcagcagcgcgcggttctttcggcgcgatagcttctgccagttcaatgttcgctgcatagtcagaggtgtcggagaagaccacatcgtcttcaccgctctgcgccagcacctggaattcgtgagaggcgctgccgccgatagaaccggtgtcggcttgtacggcgcggaaatccagccccatgcggctgaagattttgctgtaggccgcatacattgcatcgtaggtttcctgcagggattcctgagaagtatggaaagagtaagcatctttcatcaggaattcgcgggaacgcatgacgccgaaacgcggacgcacttcgtcgcggaacttggtctggatctgatagaagttcagcggcagctgtttgtaagagctaagctcgttacgaatcaggtcagtgataacttcttcatgagttgggccgagtacgaacggacgctcgccacggtcaacaaaacgcagcagttccggaccgtactgttcccaacgaccactctcttgccacaaatcggctggctgaaccaccggcatcgacacctcgatcgcaccggcgttgttcatctcttcacgcacgatgttttcgacttttttcagaacgcgcacgccggtcggcagccaggtatataacccggaggccagcttgcggatcatcccggcgcgcagcatcagctgatggctgatcacctcggcgtcggcaggtgtctccttgagagtggagagcaggtattggctagtacgcatgttgttacggttccagttggaaggtagaacaggctcaaggcgagcctgggacaaaaaaaagtgatttagtttaccagtgcaaaagaaatgtcaaaagagaagggcgtgaatttaacgcggttccagcgcaaagacttcaaaacctgcgtcggtgacgcgccagcgaacgttaaaatcatgtagccagacggcataggttttgcccgtttcctcacctttacgataggccgggcgcgggtcctgcgccagtacttcgcggataaacagcgttaactgcggataacgcttctccagcgtcaaaagctgcttttcgacctctgcggtaaaactcaccgccatctctgcagctggcgcactttgcgcatagctggcactggcatcgggaagcgattcggcaaaggggagatacggtttgatatccactaccggcgtaccatcgaccagatccagactgccgagcttcagaatcacgctgtctttatggcaaacaacctctttcagctctaccagcgacatgccaattgggttagggcggaaagtagagcgtgttgcgaaaacccccattctggcgttaccgccgaggcgcggtggacgcacagtcggacgccagccgccttccatcgtttgatgaaagacgaaaaggatccataaatggctgaacgcttccaggccgcgaacggcgtcggcctggttgtagggagcaatgagatgcagttcgccgttggcgctttttaccagacctggctggcgcggaacggcgaacttttctttatagggcgagcgaataacgcctatttgctcgaactggaaactgctcatttcgccgtaatgttaagcgcagaaccgatacatacagcctgacgatagcagcctggcgtaccgctggtgacttcgcagctatgcagtaatacagcattggctttcattttagaggcgttgatttgcatccgcttacgtgcggttggaatgctcggcggagagtcctgattagaggcctggcaagagtcgccactgacttcaccgagatcgcggaacggtttgccgactaattcttctgcattggtataaattcggaccggcgtggcgcgcggcgctttcggttttgcaggctccgctttcggctggggtgcagtgctttgaacgggttcgacaggggatctgcttaacatggaacagccgcttagcatgagtgctactaaacagatcggtaaagcacgcatagtatttcctcaatgtatgatcaaaacgtcaatattgaatcaggagcttgtaaaaatgacaagacgggcaagcgcccgtcctgaatgatattacaaattgtggaaacagcctaaaaattaccagcctttaacagctccgccgttaaacactttgtttgctgcttcgtaaacttcgtcagactgataagcctggacgaatttcttcacgttctcggcgtctttgttatcttcacgcgtcacgatcaggtttacgtacggggactctttatcttcaacaaagataccgtctttcgccggagtcaggccaatctggctggcataggtggtattgataactgccagagcgatttgcgcgtcgtccagagaacgcggcagttgcggtgcttccagttcaacaattttcagatttttggggttctcaacaacatcaagaacggtcggcagcaggccaacgccatctttcagtttgatcaagcccactttttgcagcagcagcagtgaacgaccaaggttagttgggtcgtttggcacggcaacctgcgaaccatcctgcagttcatccagtgatttgattttcttggagtaaccagcaatcggataaacaaaagtgttgcctactgcgaccagtttgtagccacgatctttcagttgctgatcaaggtacggtttatgctggaaggcgttggcgtcgatatcgcctttgctcaatgcttcgtttggcagaacatagtcgttgaaggttaccagctcaacgtccaggccatatttgtctttcgcaactttctgcgcgacttctgcaacctgctgttcggcaccaacaatcacgccgactttaatgtggtttggatctttttcatcctgaccgcagcctaccagtgccagtgatccgatcagggctcccactgccgcaaaggttttgaatttgaacgccataccttattccttcttcaattatttatgttgtgttgaacgttacttgcgagtgacagcccggacgatgcggtcgcctgcgaactgaattaaataaaccagaatgaccagcaataccagtaccgtattcatcaccgtcgcgttatagccgatgtagccatactgatagccaatctgacctaaaccaccggcaccgactgcaccacccatcgcggaataaccgaccagggtaatcagggtgatagttgccgcattcaccagacccggcagcgcttccggtaacagcaccttacggacgatctgcatcggcgtggcacccattgcgcgggaagcttcaattaacccggttgggatctccagcagagcgttctcgaccatacgggcaataaacggtgctgcaccaacggttaacggaacaatcgctgcctgcaaaccaatcgatgtaccgacaataacgcgggtaaacggaatcatccatacaagcaagataatgaacgggatggaacggaaaatgttcacaatcgcagaaacggtacgatacagcttcgcgttagcaataatttgccccggacgcgtgacataaagcagaacgccaaccggcagaccaatcacaaagccaaaaaaaccggatacgaaggtcattgccagcgtttcccatacgccacgaaccagcagccacatcatcggctcagacataacccagtacctctacttttacatggtgttcctgcagccaggcaatggcggcttgcgtatcttgttgtgtgccgtgcatttcagtcagcatgatgccgaacttaacgccaccggcgtaatccatctgcgcgctaataatgttgttgttgacgttgaaacgacgcgcggtttcagaaagcagtggggcatcgaccgattgaccggtaaactccagacgcagcatcggcacgcagtcagtaaatggctccgcttgcagacgttcctggtaatcttccgggatatccagatgcagggtcgactgaataaacttctgcgccagcggcgttttcggatgcgagaacacttcacttaccgtgtcctgctcgatcagttctccattgctgatgaccgccacgcaatcacaaatgcgcttcacaacgtccatttcgtgggtgatcaacagaatcgtcaaccccagacggcggttgatgtctttcagcagttcgagaatagaacgtgtcgttgccgggtccagcgcgctggtggcttcatcacacagcaatactttgggattgctggctaacgcacgggcaattgccacacgttgtttctgcccaccggaaagattcgacgggtagctatcatgcttatcgccaagaccaaccaatgacagcaattccgtcacgcgacgtttgacctcgtctttcggtgtgttgtccagctccagcggcagagccacgttgccaaaaacagtacgcgaagagagcaggttaaaatgctggaaaatcataccaatctggcggcgagctttggtcaactcggattctgacagcgtggtcagttcctggccatcgaccagcacgctaccctcggttgggcgctccagcaggtttacacaacgtataagcgtactcttacccgcgcctgaggcaccgataacgccataaatttgtccagctggcacatgcaggctgacgttgttcaacgcctggatggtgcgggtgccctggtggaacactttggtgatattcgaaagttttatcattgattatttattatcgtcattaagttagtcgtggcatctcgaatgcctgaaacgggcaacgccgtcaatgaaatggatgttaaggcatccagacgtctaaatcaatcaggtttatgcgaagagcactttcttgcaggtcgaaacatgcgatactagcgtcacatgccttattaaggagctataaaaggtggcgaagagcgtacccgcaatttttcttgaccgtgatggcaccattaatgtcgatcacggctatgtccatgagatcgacaactttgaatttatcgacggtgttattgacgccatgcgcgagctaaaaaaaatgggctttgcgctggtggtagtaaccaaccagtctggcattgctcgcggtaaatttaccgaagcacagtttgaaacgctgaccgagtggatggactggtcgctggcggaccgagatgtcgatctggatggtatctattattgcccgcatcatccgcagggtagtgttgaagagtttcgccaggtctgcgattgccgcaaaccacatccggggatgcttttgtcagcacgcgattatttgcatattgatatggccgcttcttatatggtgggcgataaattagaagatatgcaggcagcggttgcggcgaacgtgggaacaaaagtgctggtgcgtacgggtaaacctattacgcctgaagcagaaaacgcggcggattgggtgttaaatagcctggcagacctgccgcaagcgataaaaaagcagcaaaaaccggcacaatgattaaaagatgagcggttgaaataaaaatgcatttttccgcttgtcttcctgagccgactccctataatgcgcctccatcgacacggcggatgtgaatcacttcacacaaacagccggttcggttgaagagaaaaatcctgaaattcagggttgactctgaaagaggaaagcgtaatatacgccacctcgcgacagtgagctgaaagccgcgtcgcaactgctctttaacaatttatcagacaatctgtgtgggcactcgaagatacggattcttaacgtcgcaagacgaaaaatgaataccaagtctcaagagtgaacacgtaattcattacaaagtttaattctttgagcatcaaacttttaaattgaagagtttgatcatggctcagattgaacgctggcggcaggcctaacacatgcaagtcgaacggtaacaggaagaagcttgcttctttgctgacgagtggcggacgggtgagtaatgtctgggaaactgcctgatggagggggataactactggaaacggtagctaataccgcataacgtcgcaagaccaaagagggggaccttcgggcctcttgccatcggatgtgcccagatgggattagctagtaggtggggtaacggctcacctaggcgacgatccctagctggtctgagaggatgaccagccacactggaactgagacacggtccagactcctacgggaggcagcagtggggaatattgcacaatgggcgcaagcctgatgcagccatgccgcgtgtatgaagaaggccttcgggttgtaaagtactttcagcggggaggaagggagtaaagttaatacctttgctcattgacgttacccgcagaagaagcaccggctaactccgtgccagcagccgcggtaatacggagggtgcaagcgttaatcggaattactgggcgtaaagcgcacgcaggcggtttgttaagtcagatgtgaaatccccgggctcaacctgggaactgcatctgatactggcaagcttgagtctcgtagaggggggtagaattccaggtgtagcggtgaaatgcgtagagatctggaggaataccggtggcgaaggcggccccctggacgaagactgacgctcaggtgcgaaagcgtggggagcaaacaggattagataccctggtagtccacgccgtaaacgatgtcgacttggaggttgtgcccttgaggcgtggcttccggagctaacgcgttaagtcgaccgcctggggagtacggccgcaaggttaaaactcaaatgaattgacgggggcccgcacaagcggtggagcatgtggtttaattcgatgcaacgcgaagaaccttacctggtcttgacatccacagaactttccagagatggattggtgccttcgggaactgtgagacaggtgctgcatggctgtcgtcagctcgtgttgtgaaatgttgggttaagtcccgcaacgagcgcaacccttatcttttgttgccagcggtccggccgggaactcaaaggagactgccagtgataaactggaggaaggtggggatgacgtcaagtcatcatggcccttacgaccagggctacacacgtgctacaatggcgcatacaaagagaagcgacctcgcgagagcaagcggacctcataaagtgcgtcgtagtccggattggagtctgcaactcgactccatgaagtcggaatcgctagtaatcgtggatcagaatgccacggtgaatacgttcccgggccttgtacacaccgcccgtcacaccatgggagtgggttgcaaaagaagtaggtagcttaaccttcgggagggcgcttaccactttgtgattcatgactggggtgaagtcgtaacaaggtaaccgtaggggaacctgcggttggatcacctccttaccttaaagaagcgtactttgcagtgctcacacagattgtctgatgaaaatgagcagtaaaacctctacaggcttgtagctcaggtggttagagcgcacccctgataagggtgaggtcggtggttcaagtccactcaggcctaccaaatttgcacggcaaatttgaagaggttttaactacatgttatggggctatagctcagctgggagagcgcctgctttgcacgcaggaggtctgcggttcgatcccgcatagctccaccatctctgtagtggttaaataaaaaatacttcagagtgtacctgcaaaggttcactgcgaagttttgctctttaaaaatctggatcaagctgaaaattgaaacactgaacaatgaaagttgttcgtgagtctctcaaattttcgcaacacgatgatggatcgcaagaaacatcttcgggttgtgaggttaagcgactaagcgtacacggtggatgccctggcagtcagaggcgatgaaggacgtgctaatctgcgataagcgtcggtaaggtgatatgaaccgttataaccggcgatttccgaatggggaaacccagtgtgtttcgacacactatcattaactgaatccataggttaatgaggcgaaccgggggaactgaaacatctaagtaccccgaggaaaagaaatcaaccgagattcccccagtagcggcgagcgaacggggaggagcccagagcctgaatcagtgtgtgtgttagtggaagcgtctggaaaggcgcgcgatacagggtgacagccccgtacacaaaaatgcacatgctgtgagctcgatgagtagggcgggacacgtggtatcctgtctgaatatggggggaccatcctccaaggctaaatactcctgactgaccgatagtgaaccagtaccgtgagggaaaggcgaaaagaaccccggcgaggggagtgaaaaagaacctgaaaccgtgtacgtacaagcagtgggagcatgcttaggcgtgtgactgcgtaccttttgtataatgggtcagcgacttatattctgtagcaaggttaaccgaataggggagccgaagggaaaccgagtcttaactgggcgttaagttgcagggtatagacccgaaacccggtgatctagccatgggcaggttgaaggttgggtaacactaactggaggaccgaaccgactaatgttgaaaaattagcggatgacttgtggctgggggtgaaaggccaatcaaaccgggagatagctggttctccccgaaagctatttaggtagcgcctcgtgaactcatctccgggggtagagcactgtttcggcaagggggtcatcccgacttaccaacccgatgcaaactgcgaataccggagaatgttatcacgggagacacacggcgggtgctaacgtccgtcgtgaagagggaaacaacccagaccgccagctaaggtcccaaagtcatggttaagtgggaaacgatgtgggaaggcccagacagccaggatgttggcttagaagcagccatcatttaaagaaagcgtaatagctcactggtcgagtcggcctgcgcggaagatgtaacggggctaaaccatgcaccgaagctgcggcagcgacgcttatgcgttgttgggtaggggagcgttctgtaagcctgtgaaggtgtactgtgaggtatgctggaggtatcagaagtgcgaatgctgacataagtaacgataaagcgggtgaaaagcccgctcgccggaagaccaagggttcctgtccaacgttaatcggggcagggtgagtcgacccctaaggcgaggccgaaaggcgtagtcgatgggaaacaggttaatattcctgtacttggtgttactgcgaaggggggacggagaaggctatgttggccgggcgacggttgtcccggtttaagcgtgtaggctggttttccaggcaaatccggaaaatcaaggctgaggcgtgatgacgaggcactacggtgctgaagcaacaaatgccctgcttccaggaaaagcctctaagcatcaggtaacatcaaatcgtaccccaaaccgacacaggtggtcaggtagagaataccaaggcgcttgagagaactcgggtgaaggaactaggcaaaatggtgccgtaacttcgggagaaggcacgctgatatgtaggtgaagcgacttgctcgtggagctgaaatcagtcgaagataccagctggctgcaactgtttattaaaaacacagcactgtgcaaacacgaaagtggacgtatacggtgtgacgcctgcccggtgccggaaggttaattgatggggttagcgcaagcgaagctcttgatcgaagccccggtaaacggcggccgtaactataacggtcctaaggtagcgaaattccttgtcgggtaagttccgacctgcacgaatggcgtaatgatggccaggctgtctccacccgagactcagtgaaattgaactcgctgtgaagatgcagtgtacccgcggcaagacggaaagaccccgtgaacctttactatagcttgacactgaacattgagccttgatgtgtaggataggtgggaggctttgaagtgtggacgccagtctgcatggagccgaccttgaaataccaccctttaatgtttgatgttctaacgttgacccgtaatccgggttgcggacagtgtctggtgggtagtttgactggggcggtctcctcctaaagagtaacggaggagcacgaaggttggctaatcctggtcggacatcaggaggttagtgcaatggcataagccagcttgactgcgagcgtgacggcgcgagcaggtgcgaaagcaggtcatagtgatccggtggttctgaatggaagggccatcgctcaacggataaaaggtactccggggataacaggctgataccgcccaagagttcatatcgacggcggtgtttggcacctcgatgtcggctcatcacatcctggggctgaagtaggtcccaagggtatggctgttcgccatttaaagtggtacgcgagctgggtttagaacgtcgtgagacagttcggtccctatctgccgtgggcgctggagaactgaggggggctgctcctagtacgagaggaccggagtggacgcatcactggtgttcgggttgtcatgccaatggcactgcccggtagctaaatgcggaagagataagtgctgaaagcatctaagcacgaaacttgccccgagatgagttctccctgactccttgagagtcctgaaggaacgttgaagacgacgacgttgataggccgggtgtgtaagcgcagcgatgcgttgagctaaccggtactaatgaaccgtgaggcttaaccttacaacgccgaagctgttttggcggattgagagaagattttcagcctgatacagattaaatcagaacgcagaagcggtctgataaaacagaatttgcctggcggccgtagcgcggtggtcccacctgaccccatgccgaactcagaagtgaaacgccgtagcgccgatggtagtgtggggtctccccatgcgagagtagggaactgccaggcatcaaattaagcagtaagccggtcataaaaccggtggttgtaaaagaattcggtggagcggtagttcagtcggttagaatacctgcctgtcacgcagggggtcgcgggttcgagtcccgtccgttccgccacttattaagaagcctcgagttaacgctcgaggttttttttcgtctgtatatctattattgccagaatcgcaaaaatcctctgcattttacgctctttttcctcaacagtctgaagcccataatcacctcagttaacgaaaatagcattaaaagaggcatattatggctatccctgcatttggtttaggtactttccgtctgaaagacgacgttgttatttcatctgtgataacggcgcttgaacttggttatcgcgcaattgataccgcacaaatctatgataacgaagccgcagtaggtcaggcgattgcagaaagtggcgtgccacgtcatgaactctacatcaccactaaaatctggattgaaaatctcagcaaagacaaattgatcccaagtctgaaagagagcctgcaaaaattgcgtaccgattatgttgatctgacgctaatccactggccgtcaccaaacgatgaagtctctgttgaagagtttatgcaggcgctgctggaagccaaaaaacaagggctgacgcgtgagatcggtatttccaacttcacgatcccgttgatggaaaaagcgattgctgctgttggtgctgaaaacatcgctactaaccagattgaactctctccttatctgcaaaaccgtaaagtggttgcctgggctaaacagcacggcatccatattacttcctatatgacgctggcgtatggtaaggccctgaaagatgaggttattgctcgtatcgcagctaaacacaatgcgactccggcacaagtgattctggcgtgggctatgggggaaggttactcagtaattccttcttctactaaacgtaaaaacctggaaagtaatcttaaggcacaaaatttacagcttgatgccgaagataaaaaagcgatcgccgcactggattgcaacgaccgcctggttagcccggaaggtctggctcctgaatgggattaagcctctctgacagctcctccgggagctgtttttacatgctcgctaaggaaatcgataaaagcccggatgcgcgtacttaccgcacggtcgctgtaatagacggcactgaatggcatttccactggcaacactttatctgccattaactccaccaattctccgcgagcgatttctttgtcgatcatgtagtcggacaaacacgcaatcccgttgccactcaggcaaagctgtttcagtgtttccccactattggatgacaaaccgtacttcacctcatgtaattgtccatcgctacgggctatcggccaggtattgagggaagcgggttcagtgaatcccaggcaaatatgttgctttaaatcgtcgatcgtttctggcttcccgtagcgggaaatataatcgggggaggcgataatttttcgataactgttaaataacggcctggcacgtaagctggaatccgttaacgtaccagcgcgtatcgcgacatccacttttctttcgatcaaattaataatcgtttcggaggagactagcgacaaagtgacttccggatagcgttcacggaaaggcttaattaacggcatcagaaagtgcagcaccactggagttgcggcatcgatccgtaacagtccacgcggtgtattacgcgtctccataatttctgattctgccgctgccatctcctgcaaaattgactgtacgcgacgaaaataacgctcgccttcttccgtcaggctaagttgtcgcgtggtccgattaagcaggctaacgccaagtttcatctccagctttttcaccgcccggcttaccgctgagtttgcttgccctaattgttccgctgcccggctaaagctgccgctttcgacgaccgaaacaaaaatggcgagttcttccgacgtggctttcatttttgctcctgttgcaaaatagaagagatattttgaatttatttgtcattaaaccatcaggatgcgtgatatgtcatgcgatttaatgttctccataatgagcaaaattctgaccggtgtaagcacttgcttacataacaatatacaattgctcgttgaaagagtgagctaaaatccctataacagtagaaccctcccgagtgcggaagggttgacgtaatagaggtttcaaagtcaaaagtgcgaaaaaacacctatgccatgcgctatgttgccggacaacctgcggaaaggatcttaccgccggggtcttttgcgagcatcggccaggcattaccacctggggaaccgttaagtaccgaagagcgtattcggatcctggtgtggaacatatacaaacagcaacgcgctgaatggttgtcggtattaaagaactacggcaaagatgcacatctggtgttattgcaggaagcgcagacaacgccagagttagtacagtttgcgaccgctaactatcttgccgccgatcaggtacccgctttcgtgctgccacaacatccttctggcgtaatgaccctttcggcggcacatccagtgtattgctgcccgttacgtgaacgagaacccattttgcgtctggcgaagtcggcactggtgacggtctatccattacctgacacccgcctgttgatggtggttaatatacacgccgtcaacttcagtctgggcgtggatgtctatagtaagcagttacttcctattggcgatcagatagctcaccacagcggcccggtcattatggcgggagatttcaatgcctggagccgtagaaggatgaacgcgttatatcgctttgcgcgggaaatgtcgctgcgccaggtgcgttttaccgatgatcagcgccgtcgggcgtttggtcgcccgctcgattttgttttctaccgtggtctgaacgtcagtgaagcttctgtactggttacgcgcgcttccgatcacaatccgctactcgttgaattcagtcccggcaagcctgataaataaggtatgtcaggtctgccacagggcagaccaacgtttggcgctgcgcaaaacgtgagcgcggtggtggcgtatgacttatctgcccacatgctggatgtcgtggcacaagctgccgaagcccggcaactgaaaaatatcaccacccgccagggatatgccgaaagtctgccatttgccgataacgcatttgatattgttatcagccgttattctgcccatcactggcatgatgttggtgcagcactgcgagaagtgaataggatattgaaacctggcggtaggctgattgtgatggacgtaatgtctccgggtcacccagtgcgcgacatctggttacagacggtagaagcattacgcgatacctctcacgtacgaaactacgccagcggtgagtggttgacgttaatcaatgaagccaatctgatagttgataatttaattacagataagttaccgctggaattttcttcatgggtcgcgagaatgcgtacgccagaagcgttagtagacgctattcgcatttaccaacagagcgcatcgacagaggtgagaacgtattttgccttgcagaatgatggctttttcaccagtgatatcatcatggtagatgcacataaagcggcataaataaaaaaggcaccgggggaatcggtgcctttttattatctggtttgtcaggaatctggcatgttgttgtttttcacaaacaacgtcagcttatcgcctggttgcagattcgcagtgtcgctgttccagcgcatcacatctttgatgttcacgccgtggcgtttagcaatgcttgaaagcgaatcgcctttgcgcacacgatacgtaatgctatcgctgttgtttgccagtcgctgtgcgctactgcctgcaccaatcgtcaaactttggcctggcttcagcttagatccgcgcagtttgttccactgctgcaaatctttggtgcttacgccgagacgtgaagcgatacttgaaagcgtgtcgccagagcgtacggtgtaaacacggctgttaagcggcgtattgtcggcaaccagcgtcgactgtacagcagcaatttcgcctgaagccagagattcacgcagttgatctgcatgcttctttggcaccatcacgtactgcgggccacttgcgcccagcgtggagccttttacgccagcgttgaatgtcttcagcttgctgacggaaatccccgccatatctgctaccttcgccatttcaaccgggctgctcaggtgcacacgcgccagagcacggctttcatcggtcgttggcagacgtacgccataacgcttgctgtttttgagaatatcactcaatgccagcattttaggcacgtactgcttcgtttcctgcggcaacggtaacgaccagaagtccgtggatttcccacgcgctttgttcgttttaattgccttcatgacccgaccttcgccgctgttataagccgctacggtcagaagccagtcgccgtcaaacattttgttcagacgctgcatcatattcagcgcggcagttgttgaagcaacaacatcgcgacgcgcgtcataattgcgggtctgtttcaaaccataattgcgccccgtgctcggaatgatctgccagatgcctgcggcattggcgccagacgttgcgtgaggatcaaaagcgctctccactatgggtagtagtaccagttccataggcatgttacgttttttaacttgccctgctatccagtacatatacggctctgcccgtaaagttacatcgtggagatagctcttattgcgtaaatatttctgtttctgttcgcgaatccggtcattttccggaattcccatctttagctcgtcgccaatgaaagcccacaagtcaccatctggcgcgatagacgtcccatcgtccatccatcgtgcctgacttgtaaactttgctgcttccccttgaccagctgcagaaaggctctgtgcgtgctgttgaacgttgccggtactctggcaacccacgagcaggacagaggcgagtaatatcgcttttgccttcatgtgtgtgtcaatagttgcttaaaagacgaccgatcataacggcgaacggagccgatgacaagaaagttttatcagaacctatctttctttgaccttaaccatgcaaaacgctcttcaggttgttgcaataatgtttcttcattaattacattaattaaatcaatatcttccgttcttaaaaaaacattaatttgccgctcatttttcagaattacgggtagtgttatttgattttttgcccgtaactccttaactttacgataataatcatttatggacaaatcgtgcggaagaatactcaaagcaaacttcatatttgataaggtatattcatgagcacaacataccaatgtatcgtcaggtaacgcacttaactttttaagtgattgatacatttgtgatgctgtcccttcaaacaaccgaccacacccaccagaaaacagtgtgtcgccgcaaaatagataaggtttactgaagtaacagatatgtcctaaagtgtgacccggcgtagcaattacactaaattcatgccccaaaacgaaggcagtttcgccatctttgactacctgtgttgttcccttatcttgtgtctcttgtggaccatacaccacaatttgtggaaacttttccaccagttcttttacgccgccaacgtgatcgtggtgatggtgggtgagaaatatggcctccggttgccagttattggcggcaatggcgtttaatactggctctgcgtctccgggatcgacaatcaggcagcgacctgcttcatcattcaaaacccagatgtaattgtcatcaaaggcgggaatactgttaagattcatagattacctctcagtgtgaaacggaaggttgtgatgaaaccggcaagagtccctcaaactgtcgtggctcctgattgctggggcgatttgccctggggaaagctttatcgcaaggcgctggagcgccagctcaacccgtggttcactaaaatgtatggttttcatctgcttaagattggcaatttaagcgcagaaatcaattgcgaagcgtgcgcggtttctcatcaagtgaatgtttctgcgcaaggaatgcccgtccaggtacaggcggacccacttcatcttccttttgccgataaatccgttgatgtttgtctactggcacatacattgccgtggtgcaccgatccgcatcgtttattgcgtgaagccgatcgggtattgattgatgatggctggctggtcattagtggcttcaatcccatcagttttatgggattacgcaaacttgtgccggtattgcgcaaaacctcgccctataacagccggatgtttactctgatgcggcagctggactggctctctttgttgaattttgaagtgctacacgccagccgtttccacgttctcccgtggaacaaacacggaggaaaactattgaatgcgcatattcctgcgcttggttgcttacaacttattgttgcccggaaacggactattcctttaacgctaaatccgatgaaacagagtaaaaacaagccacgaattcgccaggcggttggagccacccggcaatgtcgtaaaccacaggcttaaacttcaacttggtagcctgtatcttccagtgtgggattcatcgccgcggcacgagccagttcatcacagcgttcgttttccgggtgtccggcatggcctttaacccattcccatttgatttgatgctgccccaatgcagcatcaagacgttgccagagatcgacattttttactggttttttgtctgcggttttccagccacgttttttccagttatggatccactgggtgataccctggcggacatactggctgtcggtactcaaaatgacttcgcaatgttcttttaacgcctccagcgcgacaatagcggccatcaactccatacggttgttggtggtgcgggtgtagccagcgctaaaggttttctcgcgtccgcgatagcgtaaaatagcgccgtaacccccaggtcctggattgcccagacacgaaccatcggtgaaaatttctacctgtttaagcatctctggtagacttcctgtaattgaatcgaactgtaaaacgacaagtctgacataaatgaccgctatgagcactgcaattacacgccagatcgttctcgataccgaaaccaccggtatgaaccagattggtgcgcactatgaaggccacaagatcattgagattggtgccgttgaagtggtgaaccgtcgcctgacgggcaataacttccatgtttatctcaaacccgatcggctggtggatccggaagcctttggcgtacatggtattgccgatgaatttttgctcgataagcccacgtttgccgaagtagccgatgagttcatggactatattcgcggcgcggagttggtgatccataacgcagcgttcgatatcggctttatggactacgagttttcgttgcttaagcgcgatattccgaagaccaatactttctgtaaggtcaccgatagccttgcggtggcgaggaaaatgtttcccggtaagcgcaacagcctcgatgcgttatgtgctcgctacgaaatagataacagtaaacgaacgctgcacggggcattactcgatgcccagatccttgcggaagtttatctggcgatgaccggtggtcaaacgtcgatggcttttgcgatggaaggagagacacaacagcaacaaggtgaagcaacaattcagcgcattgtacgtcaggcaagtaagttacgcgttgtttttgcgacagatgaagagattgcagctcatgaagcccgtctcgatctggtgcagaagaaaggcggaagttgcctctggcgagcataaatacctgtgaaaggcgctaaaaatagcgacttgggcgatttttgcagcaaacgattcaaaagatgagaaaaaccgttgacgaaggtcgaggcaatccgtaatattcgcctcgttcccaacggaacacaacgcggagcggtagttcagtcggttagaatacctgcctgtcacgcagggggtcgcgggttcgagtcccgtccgttccgccactattcactcatgaaaatgagttcagagagccgcaagatttttaattttgcggtttttttgtatttgaattccaccatttctctgttcaatgattttactctggcgtaggtgcgtgattctcgcttgttgtctcattcattaaaattcaataatgatatcgaaccattcagcttaaatatatttctagagaataaatttatattgattaaatgaatgtatatttcaaattgattttgtttgttattatttaagtgaggtatataattagagtccgttatcaatgctaaatattctaatcattatgacaggcgagggagtgtccaattatgaattcaaaaaagctttgttgcatatgtgtgttattctcgctgcttgcaggatgtgcctctgaatcttctattgatgaaaagaagaaaaaagctcaagtcacacaaagtaatattaataaaaacactccccagcaactgacagacaaagatttattcggtaatgaaaccactctggccgtatccgaagaggatattcaagctgcgcttgatggagatgagttccgcgttccccttaattctcctgtaatacttgttcaatccggcaaccgcgcaccggaaaccattatgcaggaggagatgcgaaaatattatactgtttccacattctctggtatcccggacaggcaaaagcctctgacttgtaacaaaaacaaagataaaaatgagaacgaggatgttgccagtgctgagaatatgaactggatgcaggcactgcgttttgtggctgcaaaaggacatcagaaagcgattattgtttaccaggatatgttgcagacaggaaaatatgactctgcgctgaaatcaacagtatggtccgactataaaaatgacaaactcactgacgctatctccctgcgctacctggtacgtttcacgctggtggatgtggcaacaggtgagtgggctacctggtcgccggtgaattatgaatataaagtgcttccaccattgcccgacaagaatgaagccagtacgactgatatgacagagcagcaaatcatgcaacttaagcaaaagacctataaagcgatggtaaaagatttggttaaccgctatcaataataaattatatctgccgccaggaatttctggcggcaataatacaaaattctttgcataagaaatttttcttgacaaagacagtgcaagaaaggacatggaatccggagttaaaaactgtttgttttagaatatttaattatttaactgctgaatcttccttgcgagaaatatatccattattacatttcatgccatttttaatatagattgctcctgggaaaattcccgtattattaccgcaggggtgataattagtattgacatatcctgtgacaaaaggagctattaaaggtgctattacgatagctattagtaaaaatataagagttagctgtattgttatgtctgtggcgaaattgactaccttcgtttttttgattaagaatgattttattatcgtaagtaaaattacatgaatatttaaaaaggaaaacgacatgaaaccgaagcacagaatcaacattctccaatcataaaatatttccgtggagcattttattattgaatatagaggtttaactccggtaaaaaacaaagaagcattgaatgcagggaaaaataatatggccataaaaaacatcgaaagaaactcttttaatttaacatgtaaacgcatggttaatcctcatatcacgggtggagtgttaagaacatacataaatggagtcatgttttcccttttccatttatcaagttcctgttgccgttttagtccatctctaattgcatattttaatttttctgataaatggcattgagcatcgatttcatttaaaacaactgtacacactatccctgtcagtaaaattgctcctccgacaagaattactggaaagccaaagctaacacaggcaaaagaagccagacttccaatagcggttgcaacaccaccggctataactgctttggccacatccattgaaaaatcgccaagaaaattaaccagatctcgctctgaactcataataaattctatggttctgctgatttaaccgcagagaagttcgccacagcaatccgaaaccactggcacgtggagaataagctgcacaggcgtctggacgtggtaatgaatgaagacgactacaaaataagaagaggaaacgcagcagaattattttcagggatacggcacattgctattaatattttgacgaatgagaaggtattcaaggcagggttaagacgtaagatgcgaaaagcagccatggacagaaactacctggcgtcagtccttgcggggagcgggctttcgtagtaataccccgactctccccgtccttaaacacaacccccactcaccacaacctaaactcatccgcatcctgccatgccggaaacttttctctatattcccgcaatgctgccatcgacagctccgcatcaatgcgcgttgcctgatgcgcgtcggcagtagcgataatctctccttgcggattaatcacccggctgtcaccgcgataatggcagccgttgccatcgctgccgacgcgattgcatcccgccacatacgcctgattctcaatcgcgcgggccgtcagcaatgcctgccagtgcagagagcgcggagcaggccagttggcgacgtacagggcgaggtcataatcgttgagattgcgcgaccacacaggaaaacgtaagtcgtagcacaccagcggcaaaatacgccagccgcgccattccacaatcactcgcgcattgcccgctttataatgtagatgctcatctgccatgcggaacagatgacgcttatcataaaaatgtaccgtgccgcccggctcaaccagcaaaaagcggttaaccgaaccagactccgtttgtaatgcaacactgcctgcaatcagcgcattgcactgctgcgccttagctgtcatccagttcactacgtcatcttgtgctagcgacgaagctgccgcttccatggcaaagccgctggtaaacatctccggtagaacgatcacatcgcgcccggtaataccttccagttgacgatcaaaatgacgcaggttggcaggaccatccatccacaccagtggttgctgcaaaagcgtaatcttcaaaccaggcacggtgtacaactcctttatgcgaagggttttataactttaacaccttatcaggcagttgccttagcgcagaataaattgataacaaatgctgatattggaaatatctgatttgcaaattatcgtgttatcgccaggctttaggaggttaataacatgggcaggataagctcgggaggaatgatgtttaaggcaataacgacagtcgccgctctggtcatcgccaccagtgcaatggcgcaggatgatttaaccattagcagccttgcaaagggcgaaaccaccaaagctgcatttaatcagatggtacaagggcataagctgcctgcctgggtgatgaaaggcggtacttatactcccgcacaaaccgtaacgttgggagatgagacgtatcaggtgatgagcgcgtgcaaaccgcatgactgtggctcgcaacgtatcgctgtgatgtggtccgagaaatctaatcagatgacggggctgttctcgactattgatgagaaaacgtcgcaagagaaactcacctggctgaatgtgaacgatgcgctttcgattgatggtaaaacggtgttgttcgcggcgttgaccggcagcctggaaaaccatccggatggctttaattttaaataattagcggataaagaaacggagcctttcggctccgttattcatttacgcggcttcaactttccgcactttctccggcaactttaccggcttcgtcgccagctcttccggatcaaagtcatcaacgttaatactgcgcagacggctttcttcagctttcaccagaatagcggcttcatctttatcaatcagccccttcaccagcgcgttgtgcgccagttcatccagacgggtaaacggcaggtttttacccagctctttacagatccgctgatgaattgggtcggcggcaatcacatccaccagcgcctcttccagcaagccaaccggattatgctcgctcggcgtcaggtactgaccgcgaccaatgcgggaacgggtggcgttcggcacttgtaaaatcttcgccactttatgatccagcttgtcagaaggtgccagataatgacgtccggtcgggaagatcaccacattcagcagcccggcaaccacgcggttcgggaagttttgcagtaaatcatccatcgcctgttcagcctgatacagcgcatcttgtacgccccagtgcaccagcggcaggtcggcttcattacggccttcgtcgtcataacgcttcagcacggcagaggcgaggtagagctggcttaaaatatcccccagacgggccgagatgcgctcgcgacgtttcaggctgccgcccagcactgccatcgagacatcagaaagcagggcgaggttggcgctcaggcggttcaggtgctgatagtagcgtttagtggcatcgccggttggcgtgctgctggttaaaccgcgcgtcaggcccagccagaagctgcgaactttgttgctaccgacgtgaccgatatgtttgaacaacagtttatcgaacgcgttgacgtcattgttcttcgccgcttccatctcttccagcacgtacggatggcaacgaatcgctccttgtccgaagatcatcatgctgcgggtcagaatgttagccccttcaacggtgatggcaatcggtgcgccctggtaagcacgcgccaggaagttgctttgcccgagcataatgcctttaccgccggtaatatccatcgcatcaataatcgactgctgcccgcggtgggtacagtgatacttaacgatagccgacagcacggcaggtttttcgccgagcataatgccgtaggtaatcagcgatgccgcagcatccatcacgtaggcattaccggcaatacgcgccagcggctcttcaatcccttccatcttaccaatagagattttgaactgacggcgaatgtgagcatacgcgccggttgccagcgctaccgatttcacgccgccggttgagttggaaggcagggtgatgccgcggcctaccgagaggcactccaccagcatccgccagccttgcccggccattttcggcccgccgatgatgtaatcgatcggcacgaagacatctttaccgcgcgtcggtccgttctggaacggtacgttcagcgggaagtggcgacgaccaatttccacgcccggcgtggtggttgggatcagcgcacaggtaatgcctaaatcttctgcaccgccgagtaatttttccgggtcggagagtttaaacgccagcccaagcacggtcgcaatcggtgccagcgtaatgtagcgtttgttccaggtcagacgcatccccagcacctgctggccctgccattcgcccatgcagacaatcccggtgtccggaatcgcgcccgcatcggaacccgcttccgggctggtcagtgcaaagcaggggatctcctgaccacgcgccagacgcggcagatagtgatctttctgctcgtcagtgccgtaatgttgcaacagttcgcccgggcctaatgagtttggcacgccgacggtaatcgccaggatcccgctcacgccggagagtttttgcagcacgcgagactgggcataagccgagaactccagcccgccgtactcttttttgatgatcatcgcgaagaaacgatgctctttaaggtacgcccacaactccggcggcagatccgccagctcatgggtgatctggaaatcattcgccatccggcaggcttcttctaccgggccgtcgagaaacgcttgctcttcggcggtcaggcgcggctgcggatagttatgcagctttttccagtccggcttgccctggaacaagtcgccctcccaccaggtggtgcccgcatcaatcgcttctttctcagtgcgcgacatcggcggcatcaccttacggaaaccgcgaaataccggcgcggaaatcatcgacttacgcataggcgcaaagttaaatggcacgaggataatggccagaggcaccagtacccacgccgaccacagaccagcaacgccgagggcggctgtccaggcgagcaaaatcagactgctgataaataagctcacgcggtgatagaacaacgcgccgagcaggacaaccgtagcgagaatactcaaaatcatcataacgaaaagccccttacttgtaggaggtctgaccacttgtgatgatatggttgtagtggatgtaaaaacatttagcaatatgtttacaatataattacaacaaagctcacattgttgctgtttttatccgcacttcaggtcaaaaagtcctggtcatagcacctgcccgtacttctcgcttttggcggtatccggtacactgcattttgtctattacatttatgctgaaggatatcctcatgtaccaggatcttattcgtaacgaactgaacgaagcggcggaaacgctggctaactttttaaaagatgacgccaatattcacgccattcagcgcgcggcggtcctgttagcagacagctttaaagccggtggcaaagtgctttcctgcggcaacggcggttcccattgcgacgctatgcactttgccgaagagttgaccggtcgctaccgtgaaaaccgtccgggctacccggcgattgctatttctgacgttagtcatatttcctgcgtcggtaatgatttcggtttcaatgatattttctcccgctacgttgaagcggtaggtcgcgaaggcgatgtactgctggggatctccacctccggtaactctgcaaacgtgatcaaagcgatcgcagcggcgcgtgagaagggaatgaaagtgatcaccctgaccggtaaagacggcggcaaaatggctggcacggcggatatcgaaattcgcgtaccgcactttggttatgccgaccgcattcaggagattcacattaaagtgatccatatcctgatccagttgattgaaaaagagatggttaagtaagtctggcgtaggccggataagacgtttacgccgcatccggcatttgtgcgctgatgcctgatgcgacgctgacgcgtcttatcatgcctacaaatctgtacgcgaaccgtaggccgaataatgcgttcacgccgcatccgacctgaaaattcttaaatcaatcttcgccgggggccatgcgctcccgctgttgtggaggttacccatgtgcgaattgctcgggatgagcgccaacgtccctaccgatatctgctttagtttcaccgggcttgtacagcgtggtggtggaaccgggccacataaagatggctggggcattaccttttacgaaggtaaaggctgtcgcacatttaaagatccacaacccagctttaattcccccatcgccaaacttgtccaggactacccgataaaatcctgttcggtggtggctcatattcgccaggctaatcggggcgaggtggcgctggaaaatactcacccatttacccgcgagttatgggggcgtaactggacttatgcccataacggacaactgacgggctacaaatcactggaaaccggcaacttccgcccggtaggcgaaaccgacagcgaaaaagccttctgctggctcctgcataaattaacgcagcgttacccgcgcacaccgggcaacatggcggcggtatttaaatatatcgcctcactggcggatgaactgcggcagaagggcgttttcaacatgctgctttcggacgggcgctatgtaatggcgtattgctcgactaatttacactggatcacccgccgcgcgccgtttggcgtggcaacgttgctggatcaggatgtggaaatcgacttcagctcgcagaccacaccgaatgatgtggtcacggtgattgcaacacagccgctgacgggcaatgaaacctggcaaaagattatgccaggcgaatggcgcttattttgcctcggggagcgtgtagtttgatgccagttgtggctgcacaacttcgtggcttaacggcttgctgaccacgtaacgaccattgaccacagaaacggttggtggcttacgggtttgctcaaagtagtcgtaacccggcttcagttgctcccagaagtccttaaagttggaatatttatggcgcttcatattggcgtcggtcatgcggaacgggtaaatactcacttgcacgctcggctgaccaaacaccagcgcaccagtaacgaactggaatatctcatcaataccctgattggtcattgcgtagcagccgatggaaacacaatcgccgtggatcatcaggtatttcccttcataaccatgcgcacggtcataggcattggggaaaccaatattaatcgctttgtagtaacggctgtctggttttaactgattacgctggacgctataaaacccttccgggcttttgaaatcgccctgacgctgttttggccctaagccgccggaatatttacagattttatagctgtcgagcagttgatattgctcgcccattttgacgtagagatcgagcgtacgttcttccttgaagatctggatgtagacaggggatcccatcaactgctgcttatactctttgctcacaggcgtggtagagctactgctgcccagcaaaccggcaaatgaaacgcacgggatcaacaacatcgcaagaattaatgcgattttacgcatactgcttattccttgataaaacggttacacacgccaggacggcaaaatggatcccaaatcggaatagtctggatttggaaggctcacattatcaccaaaagagttttacgcaagcctgtcggcgcagggtttacaaatttcatcggaagcgggctttacccaaagagcgccgcgtgagttccagttctctcaaatcgtaaaagtttatcggtaagtttgtaaatcaggatccagtccggttcgacatgagcatcgcgataacctttccatgaaccttgcagcgggtggtctttataaacagctggaagcggtaaagtattattgataagaagcgtcataagatatttcaatttattcatatccttatgacgcttttgtgcaagttttacatcctttgaatattgtcccgagtattcaatatccctttgaatcatatttaaattcctaatttatcaaataaatcatcggcgtctttggccttatgaacatcaatgccagcttcgctgtttttgattgattgaatggttaattgattaggctcgcgtaaatcaaacggcaatgccttttcacgcgcgacctttgtgagggttatgcgaaccaggtcagagatggtcagccccatcccggccagtacgtccgctgcctgattcttcagatcttcatcgattcgggcgcgaacaaacgcgttagcagccattggggtatctcctgtgctgtatatttattcagcttgaattgtagctcaaatgagcaacagcgacaatccatgagtaatttaataaacggatgtttttacataattaactgaaatatatatgttaattttataataatggtttattaagtttgttcagaaacgatccgggatacactgcaacattaaagcatgaccagccattattgagtatgtccttgccgtcgattccatcctttgtattgtcgggattactgttgatttgtttgccgttttcttcatttgccagcgccaccacatcacatatctctttcagctacgccgcccgccagcggatgcaaaaccgtgcgcgtttattaaaacagtaccaaactcatctgaaaaagcaggccagctatattgtggaaggcaatgccgaaagcaaaagggcgctacgccagcacaaccgggagcagataaaacagcatccagaatggtttcctgctccgctcaaggcgagtgacagacgctggcaggcgctggcggaaaacaaccactttttaagcagcgaccatctgcataacattaccgaagtggcgattcaccgcctggagcagcagcttggcaagccttacgtctggggcggtacgcggcctgataaaggctttgactgtagcgggttggttttttatgcctacaacaagatccttgaggctaagctcccgcgcacggccaatgagatgtaccactatcgccgggcaacgattgtggcgaacaacgacctgcgccggggagatttgctgtttttccatatccacagccgcgagatagccgatcatatgggcgtgtatttgggcgatgggcaatttatcgagtcgccacgtaccggcgaaaccattcggataagccgattagccgaacctttctggcaggaccattttttgggcgcgcgcaggattttgacggaagagacgattttgtaggacggataaggcgtttacgccgcatccggcagttgtacgcaggtgcctgatgcgacgctggcgcgtcttatcatgcctacgagcccgcgaatatttgcgagccgctttcccgatataaaacaacctcattgccaacctttccttttcttcttaccgttgagaaaaaggagtcgccatgtctgaatatcgtcgttattacatcaaggggggaacatggtttttcacggtgaatttacgaaatcgtcgaagccaacttttgaccacccagtaccagatgctccgtcacgccattattaaagttaagcgagacaggccttttgaaatcaacgcctgggtcgttttgccagagcatatgcactgtatctggacattacctgaaggcgatgatgatttttcctcgcgctggcgggaaattaaaaagcaatttacccatgcttgtggattgaaaaatatctggcaaccacgtttttgggagcacgccatccgcaataccaaagattataggcatcatgttgattatatttatataaatccagtaaagcatggttgggtaaagcaagtgagtgattggccattctcaacgttccatcgcgatgtcgcgcgagggttatatcccatcgattgggcgggggacgtaacggattttagtgccggggagcgtatcatttcataattgtgcgcagatgcctgatgcgacgctagcgcgtcttatcatgcctacaaacttgtgccggatcggtaggccggataaggcgtttatgccgcatccggcagttatgcgcagatgcctgatgcgacgctggcgcgtcttatcatgcctacaaacttgtgcctgaacggtaggacggataaggcgttcacgccgcatccggcagttgtgcaccaatgctggatacttacatcaacgcccccataatcttcaactccagctcatccggcacttcgttatacgacagcacatgcagccccggcgcaaacaaccttgcataacgcgccagcaaagggcgcagctgcggtggcaccagcagcaccgggtctttccccgccgctttcatctgctctttcacctgtggcatcgtactctggaactggttgagcatattcggatcgaccggcacgctgtcgagcatcactttcccgccctgttgcgcctgattcaccacgttggtcagcagattttccagctcattattcagcgtatacaccgtcagctcctgcttgcgaacgaacggatgggtaatgctgcgccgcaatgccaggcgcacatcggccgccagcagaatatgatctttcgtcaccgtgctactggcgaccagcacggtggcgatggtgacgatatcgcgcagggaaacgccttcggtcagcagcgcccggtacactttcagcaactggctgtaattgagcgccgcgctcaaatcttccgccagacgcggtgccgtcgacgataaacggttatgcaactgcgtaatatcatcatagttaaacaaatcaggaatatagctgcgcacaatcttatttacatgggtagcgatcacgctggcgctgtcgatcacctgataccccatattcagcgccttcgctttctgcgccgcctggatccaggtgaccggcatcccgtacgccgggtcgttcccctgcacgccgtcaatctcgccgtaggtttcgctggagggcagggccatcagtttatccgccggaatatccgcttcatcagcctttatgccgttgatgaaaatggcgtactgactgggcttaaggcggaagttttcccgaatgcggatctccggcagcagcacgccgttgccgtcagaaatcacctgccgcacgccgcgaatccgctgggtgagcgggttaccctgtgctttgtccaccagcgccaccagtttgtaaccgaggcttaaactgataggctcgatcagcggaatggtttcccaactgacctgctgctcgctggtttcggtgatggtgcgggtcagcgtttcgaggcttttctcttccgcctccgccgccagcggctgtttgctcatccgccagccggtaaaaccaagcagggcgctgaacagcaaaaacggcaggtgcggcattcccggtaccaccgccagcacgaacataatcccggtggcggtgtagagcaccgacgggcttgccagcagctggttacgcacgtcatgggcgatatcgccgttgtcgctgacgcgggtgacgataatcgccgccgcggtggagagcagcagggaagggatctgcgccaccaggccgtcgccgatggtcatcagcacatactgctggaaggcagcatcggcgctcaggttgtatttgaagatcccgatacagacgccgccgatcaggttgatcgccagaatcatcatcccggcgatggcgtccccgcgcacaaacttcgatgccccgtccatcgcgccgtagaaatcggcctcgctggcaacatctttacgccgggtttgcgcctgcgcctggttgatcaatccggcgttaagatcggcgtcaatcgccatctgtttgccgggcatcgcgtctaaggtaaagcgggcagaaacctcggaaatacgctcggcccctttggtgacgacaataaagttgattgtcaacagcgtcagtaaatccgagcgtgaaagcattatcgccgcgctgcacgggcagtcgatttttaacggtggtgggctgtcgccgttaaataaaatcagcccgtctcatccgccaaaacctgccaccgtggcggtgccggaagagacggagaaaaaagcgcgtgatgtgaatgagaaaacggcgctgctgaagaagaaatccgccaccgagcttggtgagctggcaaccagtatcaacaccattgcccgtgatgcgcatatggaagcgaatctggagatggagattgttccccagggattacgcgtgctgattaaagacgaccagaaccgcaatatgtttgaacgcggcagcgcgaagattatgccgttctttaaaacgctgctggtggagctcgcgccagtgttcgactcgctcgataataaaattattattaccgggcataccgatgcgatggcctacaaaaacaatatctacaacaactggaacctttcgggtgaccgcgcgctttcggctcgtcgggtgctggaagaggccggaatgccggaagataaagtgatgcaggtaagcgcaatggcggaccagatgctgctggattccaaaaatccgcaaagcgcgggcaaccggcgcattgagattatggtgctgaccaaaagtgcgtccgatacgctgtatcaatactttggtcagcatggggataaagtggtgcagccgctggtgcaaaagctggataagcagcaggtgctttcgcagcgaacgcgttaaatgctgaatctttacgcatttctcaaaccctgaaatcactgtatactttaccagtgttgagaggtgagcaatgcgtaaaatcattcatgtggatatggactgctttttcgccgcagtggagatgcgcgacaatcccgccctgcgcgatatccctattgctattggcggcagccgcgaacgtcggggggtgatcagcaccgccaattatcccgcgcgtaaatttggcgtacgtagcgctatgccgacagggatggcgctcaaattatgcccacatctcaccttgcttccggggcgctttgacgcctacaaagaagcctcaaatcatatccgtgaaatcttctcgcgctacacctcgcgcattgaaccgttgtcactggatgaggcttatctcgatgtcaccgatagcgtccattgccacggttctgcgaccctcatcgcccaggaaatccgccagacaatcttcaacgagctgcaactgacggcgtctgcgggcgtggcaccagtaaagtttctcgccaaaatcgcctccgacatgaataaacccaacggccagtttgtgattacgccggcagaagttccggcatttttacaaaccttaccgctggcaaaaatccccggcgtcggcaaagtctcagcggcaaaactggaagcgatggggctgcggacctgcggtgatgtacaaaagtgtgatctggtgatgctgcttaaacgctttggcaaatttggccgcattttgtgggagcgtagtcaggggattgacgaacgcgatgttaacagcgaacggttgcgaaaatccgtcggcgtggaacgcacgatggcggaagatattcatcactggtctgaatgtgaagcgattatcgagcggctgtatccggaacttgaacgccgtctggcaaaggtaaaacctgatttactgattgctcgccagggggtgaaattaaagttcgacgattttcagcaaaccacccaggagcacgtctggccgcggctgaataaagctgatctaatcgccaccgcgcgtaaaacctgggatgaacgccgcggcgggcgcggtgtgcgtctggtggggctgcatgtgacgttgcttgacccgcaaatggaaagacaactggtgctgggattatgatgtatactattatgtatattctggtgtgcattattatgagggtatcactgtatgcatcgaattctcgctgaaaaatcggtcaatatcactgagttacgtaaaaacccagctaaatactttattgatcaaccggttgcggttctttctaataatcgccccgcaggatatctcttaagtgccagcgcattcgaagcgttaatggacatgcttgctgaacaagaggagaaaaagcccataaaggcgcgcttccgtccaagtgctgcaagattagaggaaattacacgccgcgctgaacaatatcttaatgatatgacggatgatgatttcaatgactttaaggaataaggatgcgggtattcaaaacaaaacttattcgcctgcaacttacagcagaggaacttgatgcgttaacggcggattttatttcctataagcgtgacggtgttttgccagatatatttggtcgcgatgcactctacgacgactcctttacctggccattaatcaaatttgagcgagttgctcatattcatctggcaaatgagaataatccatttccgccacagttgcgccaattcagcagaacgaatgacgaagcgcatttggtatattgtcagggggcgtttgatgagcaagcatggttgctcattgccattctgaaacctgaacctcataaactggctcgagataacaaccaaatgcataaaattgggaaaatggcagaagcgtttcgcatgcgtttttgaatttatattatgaataacatacaaataagaaactatcagcctggcgattttcagcaactatgcgctattttcattagagcggttacgatgaccgccagtcagcattattcaccacaacaaatttccgcctgggcgcagattgacgaatctcgctggaaggagaaactcgcgaaatcacaagtgtgggttgcgatcattaatgcacaaccggttggttttatttcccgcattgaacattatatcgatatgttatttgttgaccctgaatacacccgccgtggggttgccagcgctttgttaaaacctttgattaagtctgaatccgaacttacggtggacgcaagcataaccgcaaaacccttttttgaacgttatggttttcagacagttaagcagcagcgcgttgaatgccggggagcgtggtttactaatttttatatgcgatataaaccgcaacattaaatccagcttgcaatgaaaataacgcccgcctggtatgtgcgcgttttctgattccacaaactgcaaggaggtaaatcatgacaaatcctttatcaatgactctttgcagacctttccaggattaattctttttttcttgccctggattcgtctgccatttcctgatttttatatttatatactctaaataattcgagttgcaggaaggcgacaagcgagtgaatcgccaggagcttacataagtaagtgactggggtgaacgaacgcagtcgcagtacatgcaacttgaagtatgacgagtataaatggaatggtacatgggcaaatatattcgtcccttatccgatgcggtatttaccatcgcatctgatgacctgtggatcgagagtttagcgatccaacaattacacaccacggcaaatttacccaacatgcagcgcgtagtggggatgccagatttacaccccggacgcggctacccgattggcgcagcgttcttctctgttggtcgtttttacccggcaagacgtcgcggtaacggtgctggaaacagaaacgggccgctactctgacacactgcgttcggcgctggtttctctcgatggcgataacgcatgggcattaagcgaaagctggtgtggcactattcagtggatttgtccgagtccgtatcggcctcatcatgggcgcaaaaactggtttctgggcattgggcgttttaccgctgatgagcaggaacaatcggatgcaatccgttatgagacgctgcgttcgtcggggccgggcggtcaacatgtcaataaaaccgactcggcggtacgcgccacgcatttggcatccggtattagcgtgaaggttcagtcagagcgtagtcagcatgctaacaagcggctggcacgattgctgattgcctggaagctggagcaacagcaacaggaaaatagcgcggcgctgaaatcgcagcggcgaatgttccatcaccagattgaacgtggcaacccgcgacggacatttacagggatggcttttatcgaaggataatgaaggatgaaactgccggaaggcgattaaacgccatccggcagcaaatcaaataattacttcgccggaatttctttcagcagttcagtcagcagtgtccagtaatgacctacgctttcgatgtgaacttgctcatccggagagtgtggaccggtgatagttggcccgatagaaaccatgtccatttccggatacggttttttgaacagaccacattccaggcccgcgtggataatctggatgttcggcgtcttgttgaacaggcgctgataggtttcacgtaccagatgcatcaccggagaattagcgtccggctgccagccaggatatgcgcctttcgcttcggttttcgcgccagccagtttacccagcgaatccagcatgctcaccacgtagtctttaccgctgtcgatcagtgaacggatcaggcagtgaatttctacgttattgtcagtcatggtcaccacaccgacgttcagggaggtttcaaccacacctttggctacatcggagttacgaatcacaccgttcggggtggcgttcagcagacgaataaaggtatcgcgagatttcgcaatcagggcagctttatcgttcgctacagagtccagcaacaaggccagatttttctctttttctgccagctcgtttttcaggatctcctgataggtattcaccagagatttcaggacgtcgactttatcagctgcgacagcaatggtcgcaaaggcttcacgcgggatggcgttacgcagtgtgccgccgttgaaatcgataaggcgcagatccagttcttccgcatgacccgccaggaagcgcaccagcagtttgttggcattacccagcccaacgtggatttccccgccggagtgaccgcctttcagaccttttaaggttaacttgaaggtttcaaaaccagctggaaccgcttcacgatctaaatgcaggttggaggtgaagtcgataccccccgcacaacccatgtagatttcaccttcttcttcggagtcggtgttaatcagaatatcagcctgcaaccagttgccctgtaagccgaacgcaccgtccataccggcttcttcggtcatggtcagcagcacttccagcgggccgtgaaccacgttttcgtcagccagaaccgccagcgcagaggccataccaatgccgttatccgcacccagcgtggtgccgcgcgctttaacccattcgccatcaatataaggctggataggatctttcgtgaagtcatgcacggtgtcgttatttttctgcggcaccatatcgaggtgggcctgtaagacgaccggtttacgattttccatacctgcggtagcaggtttacgaatcaggatattacctacctgatcgcgttcgacatggaaacctttctcttttgcccaaccaacaatgtattcagcgagttgctcttcatgataggacgggtgaggaatagaacagattttggcaaaaatatcccacagcggctgtggagataattgagacagttcagacacgttaagtctccttgtcgatcacccgcaaaacagtattgcaggtcacagggttagcagaaaatgttgtcaacacaagacaggcttgcgagatatgtttgagaataccactttatcccgcgtcagggagaggcagtgcgtaaaaagacgcggactcatgtgaaatactggtttttagtgcgccagatctctataatctcgcgcaacctattttcccctcgaacactttttaagccgtagataaacaggctgggacacttcacatgagcgaaaaatacatcgtcacctgggacatgttgcagatccatgcacgtaaactcgcaagccgactgatgccttctgaacaatggaaaggcattattgccgtaagccgtggcggtctggtaccgggtgcgttactggcgcgtgaactgggtattcgtcatgtcgataccgtttgtatttccagctacgatcacgacaaccagcgcgagcttaaagtgctgaaacgcgcagaaggcgatggcgaaggcttcatcgttattgatgacctggtggataccggtggtactgcggttgcgattcgtgaaatgtatccaaaagcgcactttgtcaccatcttcgcaaaaccggctggtcgtccgctggttgatgactatgttgttgatatcccgcaagatacctggattgaacagccgtgggatatgggcgtcgtattcgtcccgccaatctccggtcgctaatcttttcaacgcctggcactgccgggcgttgttctttttaacttcaggcgggttacaatagtttccagtaagtattctggaggctgcatccatgacacaggcaaacctgagcgaaaccctgttcaaaccccgctttaaacatcctgaaacctcgacgctagtccgccgctttaatcacggcgcacaaccgcctgtgcagtcggcccttgatggtaaaaccatccctcactggtatcgcatgattaaccgtctgatgtggatctggcgcggcattgacccacgcgaaatcctcgacgtccaggcacgtattgtgatgagcgatgccgaacgtaccgacgatgatttatacgatacggtgattggctaccgtggcggcaactggatttatgagtgggccacccaggcgatggtgtggcaacaaaaagcctgtgcggaagacgatccgcaactcagtggtcgtcactggctgcatgcggctacgttgtacaacattgccgcctatcctcatctgaaaggagatgacctggccgagcaagcgcaggctttgtcaaaccgcgcctatgaagaggccgctcagcgtctaccgggcacgatgcggcagatggagtttaccgtacccggcggtgcgcccatcaccggctttttgcatatgccgaaaggcgatggcccgttcccgacggtattaatgtgtggtggtctggatgcgatgcagacggactattacagcctgtatgaacgttattttgcgccgcgcggcattgcgatgctgactattgatatgccgtcggtgggcttttcttcaaaatggaagctcacccaggactccagcctgttgcatcagcacgtcttaaaggcgctgcctaacgtaccgtgggtggatcacactcgcgtcgcggcctttggtttccgtttcggcgctaacgttgccgtgcgtctggcataccttgaatcgccgcgtctgaaagcggttgcctgtcttggtccggtagttcataccctgttgagtgattttaagtgccagcaacaggtgccggaaatgtatcttgacgttctggccagtcgtttggggatgcatgatgcttccgatgaagcgttgcgcgtggagctgaatcgctattcattaaaagtgcaaggattgctgggacgtcgctgcccaacgccaatgttatcaggctactggaagaacgatccgttcagcccggaagaggactcacgcttaatcacctcatcatctgctgacggtaaattattagagatcccatttaacccggtgtatcggaattttgacaaaggtcttcaggaaatcaccgactggatcgaaaaacgcttgtgttaaaaatttgctaaattttgccaatttggtaaaacagttgcatcacaacaggagatagcaatgacgttaccgagtggacacccgaagagcagattgatcaaaaaatttaccgcactaggcccgtatattcgtgaaggtaagtgcaaagataatcgattctttttcgattgtctggctgtatgcgtcaacgtgaaaccggcaccggaagtgcgtgaattctggggctggtggatggagctggaagcgcaggaatcccgttttacctacagttaccagtttggtctgttcgataaagcaggcgactggaagagtgttccggtaaaagacactgaagtggttgaacgactggagcacaccctgcgtgagtttcacgagaagctgcgtgaactgctgacgacgctgaatctgaagctggaaccggcggatgattttcgtgacgagccggtgaagttaacggcgtgagtgaaatgtgccggatgcatcacatccggcaatattcattaaaactgatacgtcatgccaaccgcgacaatatcatcattattaatattcaatttgttatcgctatccagttggttgattttataatcaacaaacgctgacatatttttgttgaaataatacgtagcaccgacgtcgatataattgaccagatcttcatcaccgataccttcaatatctttccctttcgataagacataacccagcgatggacgcagaccaaagtcaaactggtattgagcgaccgcttcaaagttctgtgtcttattggcaaagccgccagttattggcgtcattttgcgtgtttcagaatagaaagttgccagataaatattattggcatcgtatttcagacctgttgcccatgcttctgcacgcttgcctgtgccacggctttgcaggttctgctcgttggtgcgatctgagttggtataggccccactaatggcgaaatcgctgccgccaaagtcatatgtcaatgacgtgccgaagccatcgccgttttgctttttaacgtcgcggttttcgtttttcccttgatattgcagggttaagttcaggccatcgataacgccgaagaagtcggtgttccgatacgtcgccagaccgctggcgcgtttggtcataaagttgtcggtctgcgccgaggaatcgccaccaaattccgggaacatatcggtccaggcttccacgtcatacaacgcccccaggttacgaccataatcgaaagaacccaaatctttatatttcaacccggcaaaagcgagacgcgttttttgctgtgcagtatcactctctgctttattaccggcaaactctgcttcccaacgaccataaccagtcagttgatcgttaatttgtgtttcgcctttgaaaccaaaacggatataactctggtcgccatctttactggcgttatcactcatataatgcatggctttaactttgccatagacatccagtttattaccgtctttattatatatttctgcagcctgtacagatgcagatgccacaatgcccatcaccactaatgccagagtgctctttttcattttcattcctgattttaattaacgcgcgaatattcagcgggagagtcccgttgaaaacaggaaagtttttaacctgagattgttaaagatatattacagattaataatattcttaaaatgtggtaatttattaaatctgtaataaaagcgtaaacaactgccgctaggcttgctgatcccgcgcaacaaaacgccatgctttgctcgcagatggttggcaaccgacgacagtcctgctaaaacgttcgtttgatatcatttttcctaaaattgaatggcagagaatcatgagtgacagccagacgctggtggtaaaactcggcaccagtgtgctaacaggcggatcgcgccgtctgaaccgtgcccatatcgttgaacttgttcgccagtgcgcgcagttacatgccgccgggcatcggattgttattgtgacgtcgggcgcgatcgccgccggacgtgagcacctgggttacccggaactgccagcgaccatcgcctcgaaacaactgctggcggcggtagggcagagtcgactgattcaactgtgggaacagctgttttcgatttatggcattcacgtcgggcaaatgctgctgacccgtgctgatatggaagaccgtgaacgcttcctgaacgcccgcgacaccctgcgagcgttgctcgataacaatatcgttccggtaatcaatgagaacgatgctgtcgctacggcagagattaaggtcggcgataacgataacctttctgcgctggcggcgattcttgcgggtgccgataaactgttgctgctgaccgatcaaaaaggtttgtataccgctgacccgcgcagcaatccgcaggcagaactgattaaagatgtttacggcattgatgacgcactgcgcgcgattgccggtgacagcgtttcaggcctcggaactggcggcatgagtaccaaattgcaggccgctgacgtggcttgccgtgcgggtatcgacaccattattgccgcgggcagcaagccgggcgttattggtgatgtgatggaaggcatttccgtcggtacgctgttccatgcccaggcgactccgcttgaaaaccgtaaacgctggattttcggtgcgccgccggcgggtgaaatcacggtagatgaaggggcaactgccgccattctggaacgcggcagctccctgttgccgaaaggcattaaaagcgtgactggcaatttctcgcgtggtgaagtcatccgcatttgcaacctcgaaggccgcgatatcgcccacggcgtcagtcgttacaacagcgatgcattacgccgtattgccggacaccactcgcaagaaattgatgcaatactgggatatgaatacggcccggttgccgttcaccgtgatgacatgattacccgttaaggagcaggctgatgctggaacaaatgggcattgccgcgaagcaagcctcgtataaattagcgcaactctccagccgcgaaaaaaatcgcgtgctggaaaaaatcgccgatgaactggaagcacaaagcgaaatcatcctcaacgctaacgcccaggatgttgctgacgcgcgagccaatggccttagcgaagcgatgcttgaccgtctggcactgacgcccgcacggctgaaaggcattgccgacgatgtacgtcaggtgtgcaacctcgccgatccggtggggcaggtaatcgatggcggcgtactggacagcggcctgcgtcttgagcgtcgtcgcgtaccgctgggggttattggcgtgatttatgaagcgcgcccgaacgtgacggttgatgtcgcttcgctgtgcctgaaaaccggtaatgcggtgatcctgcgcggtggcaaagaaacgtgtcgcactaacgctgcaacggtggcggtgattcaggacgccctgaaatcctgcggcttaccggcgggtgccgtgcaggcgattgataatcctgaccgtgcgctggtcagtgaaatgctgcgtatggataaatacatcgacatgctgatcccgcgtggtggcgctggtttgcataaactgtgccgtgaacagtcgacaatcccggtgatcacaggtggtataggcgtatgccatatttacgttgatgaaagtgtagagatcgctgaagcattaaaagtgatcgtcaacgcgaaaactcagcgtccgagcacatgtaatacggttgaaacgttgctggtgaataaaaacatcgccgatagcttcctgcccgcattaagcaaacaaatggcggaaagcggcgtgacattacacgcagatgcagctgcactggcgcagttgcaggcaggccctgcgaaggtggttgctgttaaagccgaagagtatgacgatgagtttctgtcattagatttgaacgtcaaaatcgtcagcgatcttgacgatgccatcgcccatattcgtgaacacggcacacaacactccgatgcgatcctgacccgcgatatgcgcaacgcccagcgttttgttaacgaagtggattcgtccgctgtttacgttaacgcctctacgcgttttaccgacggcggccagtttggtctgggtgcggaagtggcggtaagcacacaaaaactccacgcgcgtggcccaatggggctggaagcactgaccacttacaagtggatcggcattggtgattacaccattcgtgcgtaaataaaaccgggtgatgcaaaagtagccatttgattcacaaggccattgacgcatcgcccggttagttttaaccttgtccaccgtgattcacgttcgtgaacatgtcctttcagggccgatatagctcagttggtagagcagcgcattcgtaatgcgaaggtcgtaggttcgactcctattatcggcaccattaaaatcaaattgttacgtaagatcttatcattctcccaccaaaaaattatcttaatgtaacagctggtgtaagtaaattctatcaacgaagatcaatcttatctactgaccaaaaaggcctgatagggcttcgctcactatacatccttggctgcaggtttagttgtacaccactcctaaatttaatgtgttggcaatgtgttcaataaagctcgaacaaattagctcattatgatcggttaatacttcaacttctggttgcatgattgtttgtccgtaaaaagataacgcgcctgccgggtagtagcaggcgcattacgcaataggtaaacaagggaggaagttcagaaatgtaaatcgggaaggttgtacgcaatgttcatcgtactacgttgttacggctttgccgcaacaagccagttgcctgccgcgctcgcagaatgtctgcagcccggagataaggagattgttcctgccagctaaatcccttcctgtcgatacgaaccagctcgtatttttctaccagaaaattcacggcatcggctagggtgataccggcatcgatgtgttccttaatcacagcctcattgcagaatggcgtgtcgtttattgtcagaccatagtgctgttccagcagacgtgtcagtaacatttgccagacagccacgggtgacaggcagggcttcaccgcccgctgagttattgcaggtaaagttttcatgtttgctctcgtgtaggtaattaacgctgagtggggtaaatggcgatgtatacgtagccgcaactgccaagggtgtcggcttcgcaggttaaatcgttgtggtacagggtaacgcagtgggcatggtgggggctgagttcaccggtggtcagcatcgattccatctggaggataaagtgcgggaatgtttcatccagcttccggcattcgatgtcactgaacttgccggtgatgctggcccggtcagccagataatgcagtcggttgccttcctgcaccagacgggctcccaggcgcagtgtaatctcccgctgcaggcccctggtagggttgctcattacagttctccactattgtcagttcagggtgatgctcatcaggcaggtatagggcccattgcggtcctggcggcgttcggcgtataccgcgaggactccggcgatatccggaacgtccctgccggtgtaatgacagacgctaccgtgccactggtatttgccggtgcagtagcgaaagattcgggactcaggatgctggcggtatatcgtcattgccctgcgtttactgataattttcatgtaatacctcaaagcagaccgtgttctgcgaacgaatagatttgcctgccaccgacaatcagatggtcagggacacggatatccaccagctgaagcacctgaaccagtcgctgcgtgagggttttgtcggcctggctaggtgtcgtctcgccggaaggatggttatgcgcgagtatcaccgccgccgcgttgaagtgcagagcacgtttgaccacctcccggggatgcacctcggtgcggttaatcgtgccggtgaagagcgtttcatgggcaatcaactgattctggttgtccagatacaacacccggaactcttcccgctcaagcgcggccatatgcagtcgcagccattcacgtacggcgtgggtagaggtgaaggctacgccgggctcatgcaggtggcggtccagagccctgagcgcccgctgaatgagacgccggtcctgtggcgtcatctcgccgggtaaaaaggaaagctgtttcatctgttgctccttcggtcagtcgataatacgcagaatggcgtgagcctctggatgttgcatggcatactcccgcaggcggtaatagtgtgcggtcatcgcgtcacattctgtacggcaggcatggtggctatacgcaatcaggcagacagcaatacctgctgcttctgcactcatttgggcatcgttaccgttcaggcagttaaacagacgccatgtctcatcgttgtcaggctcgggggacataaatgcgccgccattgctgagggtgtagaacgaccagataccaccgctgtagccctcacagaagcggtccatccaggcgaagatatgcggctccaggagtagccactgcgggatagcgccaaagtactgtggccagaaatcgatacgctgttcatcggggaccggcgtgacggtcagttcaaattcgggttggttagcgggtgcgaggtcgtgctgcgtctgtgttgtcatgggtatgtctccgtcaataaaaacgccagcggcgatggctggcgtatggggatataaagtgtgttcggggaggtgaatgcgggtaaatgcttcgcgatcagcgggtggccgtgtctgtacggatgcctgaggtgcggatatagcggttaagaccttcaccggcatccggctcaaagttccatgcccgccagaccatccggccttcagtatcacgaaccaccagacggaagtgactgccctggtcgtcttcgagtgtgatattgctgtacgtggtagtgaccgcttgcgcttgtctccgggtgaaaggccccggtggcagcaacacggattgggtcattttcgggctcctgataaaagaaaaccccggcagcctgctagctgtcggggtgaatttgctggggaagatactactatcagtcgttgctgcagtctccgagagtggacagaactttctcagcgttcttccggtccgcagtgaaggtccctgctttgtggtcattgacgtagacgtcgaactgcccggcctcagagatattgctgatgaagtcaaaccaggcgttatcgccgttacgccagcccaggctggacggaataatgtactgctggtgatccatcactacggtgatagtagtgtcgtcatcgtgcgaactgaccatcttgtcatcggcaagggtaagaaagactgaatgctgatagaaaccattctggtccgggttccctgtgcagttgatggtaaacgtctttccgctggcttcggtcacgctgtattccgtattgccctgaccgtaaccctgctgccagaaccccgggatagcagaggcattaaagctcgcgagcagtacacccgccagcataaaccgacttagtgaaagtattgtcattcttgtctcctttgtcgttgttttattcctgattgtcagggttcgagggtatcagtagctgccccatcagtttgccgtcatgggcgtactcaaagtatttttctttggtatacgggtccgtcacctcctggtattccagtttgatgttatcggcaatacacagcgcattcatcagtggctggacggttttttcctgcatatccacgaggtagtagtaactgccatcctcgcagccatcgggcgactggcgggtacgtaaaacctgcaaggtgggaccggataagtagtcaacctgtgaccattcttcgctgacatcatcctggtggctgaccacatcactgaaacgcggtggggtgaggtccttaaatttactgatggccttcaggtcatcacttctgtcatcgcatgcgatgagaaacagagtggtggcaaccagcgccagcagaggcagtgttttacgtttcattatttttttcctgaaatcagacgaaccactttggcaaagacataaatgcccacgaaaatacccaccggcacgccgacgaacggtgtcagcgcgacactggcagcaccggctgcgccacctcccgtcagcagtgcggcaacagtggcaagggtcagggccgcgagactgtcggacaccccggttttgttcagaatgatgacgatgacaacaatggcgataatggcaatatccggactgatactccaggtccagatacatcagccgctcacgaaaatcacgccgcagcgtgcgcaccgacacaccaaactcagcggcaagcttacgcacactcagcgtttcccctgccaccagacggctgattatcagtgacagcctgacagccagccggtcatggcggcgttctgcctgtgtcatgagacgttctccgtgaaagttaactgactgaaaatgatgtgattactttaaagagggggtcggacagggtatggacaccacagaaactatttttcatttctgcaaaagccagaggcagcgggggttacaggccttccctcggtgagtgaggaccgtcagcacggtgcgatgcggacaggtggtgtccgatattaacaaagcagcaacattaaacggtcactgcagttgcgtgagcagggcttccgccatcacccacagtgcccggttaagtttcacgtccccgtcgataccgcgaacggcacgggtatgtgaccgtcctcctttggcattacggccactgagcccgcccttaatcaggttctcctgaatacgctggtacgtggtccacaggtcattgctctcatcctgccagcggcgaggggagaggatctgcgattcagtcaccggctggtggtcttcaccaaagcggtatgtgagggcggcttttgccagtgcctgctgtgccgggggtggcaacagcaacgactgcatggcatcccgtttctcctccacccggtcaaaaatccccagcacctcatacgcgccttcaatcacctgactcaccacgtcccccttgtgtggcacccgcacctcgccaaacgactcaccgcagacgagcccgttctgacaaaccgcacgaaatagtcccggcaacatctgatacgaactggttccatcgtgagagttgagtagaataatttccggcacctgtttaccggtgatctgcccttcccgccgcagacgcagcatatgctttgtatgttcacgacgacccgggtcacgcacgcgggtctgacaggcaaagaatggctggaagccttctcgctgtaggctgtcgagcagggagatggtgggtatataggtataacgctcactacgggactcgtgtttgtcctcactgaatacactgggcactacgcgaaacagctcttcacgggttaacggacggtcgcgacggataaggtttgctgcgccaaagcgcgaagccagacgggtcataagcagactcctcataacgggaaaacaaataaaagggatccccgtcgcatcggcgacaggggcagggaagtaacagggatgggttaaatactcagaagaagaaatcccagacggcgcgggccactgacaccaccgtggtgcgcacggcctgaatgacggcccgcaccggggcgggtatcaggggaaaggcactgatgctatcgagtacggccccgacggtttcaccaaaatcgctacgagcctgttcccggactaccgtcgtgcgaaaggaaggatggagttgcgacaccaccgggctggtggcctcacgtggcaggcacttaatcatccgctcggccatcaccttaagcccccattgtagacggaccgacacagcacacaccggatggacgggctggaacagctcatgcagcaggcagattttgcggctgatattctgcttctgcgccgtggacaactgtcccccaccgctggtaggttcggccttatccgactggctgataacaaacagcaccttatgccggtatacctctccaatcacctgatgataaaaatgttcatccaccgtcagcgcccggtcatcggccttaatcagccacagtaccaggtcgaggcgaggaagctgttcgcggtacagcgcagcatactcggtatcgcgagcgccactttcgcccacgccgggcagatccatcagcgttatatagcggtcgccgacttgcaggcgaaagcgcagtggctcacgtgtacaggccgccacatcgctgaccggtgatatatctccggcaaacagggcattgcacagactgctcttcccaacaccggttttacccataatgccgatcactggctcgtagttagttaactggttaatttgctgcagaagccgctctgatacccattgcggcagatcagcaagcgattgctgaaacgacttcaaaccttcagaattattcatcactactcctctgaaaaataataaaaaacggtagaatcgtgagattccgccgttaattgcgtatgttcagagtgatgatatatatctgaagattttttcaatcctctgcgcttgaggcagctgcgcgactgctggctcaggcaatgaatgagttataatagcagcatttactaacagggatttattgagagtatgagccgccgtgatacaccttaaaatctcaacccagcaaagtttcggagccgcgagcaaaagtgagagccttcacaaaataatgcttagtaataaagttactttgaattcagagccccgattaatgtgaacatgatcaacgaattttacccagattgagttcattcagtagccaggttttgaacacatcaagcgcagaatgcatgtgttggtgctgggggaaaaccaaataatgaccgatgtaatgtatttcgctggtactgtttacaagtgggcataccagtttaccgctagcgatttcacgttcagccagtagttttgattcaagcacaactcccaagccgtcaactgcggcagcaatcgccataaagctacggtcaaatcgaaggccataattattgggtggcgtcatcttattcgcctcaaaccatcctttccactggtacaactgcacatcgcactgaatcaatgtcaacgcatagagatcctctggtttctttagccgctcagccagttggggagaacacagtggcgtaagttcttcaacagcaagcgggatcttctcatagggtgatgggcggggttcaccgtagactatatcgagatcaaaatcatcctgttcaaaacgtgcatattctgtgctggctgaaagtcgcagatcgatgcttgggttctcacgtatgaacttaccaagacgtggtaaaagccattgatgggcaaaactcggtgcagtatgaaggcgcaaaggcctggattcatcagccgtcactaatgccaacccctgctgtaattcgttaaatccccgctgtatgtgctcaagcagtatttcaccttctttcgtcagcgtaatttctcgcgtactgcgctgaaaaaggcgtacatcaagcaagttttccagtttgcggatggcatggctgatcgcactgggtgacagttccaactcagaggcggccaacgcaaaagctccggtacgaccagccgcttcaaaggcgcgtaacagatttagaggtgcttttgctaagagcttcattcatgaatccttttcactagggatgaagtggtttactgaatttggccacctgaacagaggtgatatgctcacctcagaacaacacaggtgtcataatgaaaaaaagaaatttcagcgcagagtttaaacgcgaatccgctcaactggtcgttgaccagaactacaccgtggcagatgcagccagcgctatggatgtcggcctttccacaatgacgcgatgggtgaaacaattacgtgatgaacggcagggcaaaacaccaaaagcctcccccattaccccggaacaaattgaaatccgtgagctcaggaaaaagctacaacgtattgaaatggaaaatgaaatattaaaaaaggctactgtagattcaattggtcaacgcaacagttatgtgaaaacatggggttgcggaggttttttgaatgagacgaacatttacagcagaggaaaaagcctctgtttttgaactatggaagaacggaacaggcttcagtgaaatagcgaatatcctgggttcaaaacccggaacgatcttcactatgttaagggatactggcggcataaaaccccatgagcgtaagcgggctgtagctcacctgacactgtctgagcgcgaggagatacgagctggtttgtcagccaaaatgagcattcgtgcgatagctactgcgctgaatcgcagtccttcgacgatctcacgtgaagttcagcgtaatcggggcagacgctattacaaagctgttgatgctaataaccgagccaacagaatggcgaaaaggccaaaaccgtgcttactggatcaaaatttaccattgcgaaagcttgttctggaaaagctggagatgaaatggtctccagagcaaatatcaggatggttaaggcgaacaaaaccacgtcaaaaaacgctgcgaatatcacctgagacaatttataaaacgctgtactttcgtagccgtgaagcgctacaccacctgaatatacagcatctgcgacggtcgcatagccttcgccatggcaggcgtcatacccgcaaaggcgaaagaggtacgattaacatagtgaacggaacaccaattcacgaacgttcccgaaatatcgataacagacgctctctggggcattgggagggcgatttagtctcaggtacaaaaaactctcatatagccacacttgtagaccgaaaatcacgttatacgatcatcgttagactcaggggcaaagattctgtctcagtaaatcaggctcttaccgacaaattcctgagtttaccgtcagaactcagaaaatcactgacatgggacagaggaatggaactggccagacatctagaatttactgtcagcaccggcgttaaagtttacttctgcgatcctcagagtccttggcagcggggaacaaatgagaatacaaatgggctaattcggcagtactttcctaaaaagacatgtcttgcccaatatactcaacatgaactagatctggttgctgctcagctaaacaacagaccgagaaagacactgaagttcaaaacaccgaaagagataattgaaaggggtgttgcattgacagattgaatctacaaccgcgctcttgatgtcagactccctgaacagttctcgataatcgggaaactcagggcgcgttatcctgtggccactctctgccatgtgttcggggttcatcgcagcagctacaaatactggaaaaaccgtcctgaaaagccagacggcagacgggctgtattacgcagtcaggtacttgaactgcatggcatcagccacggctctgccggagcaagaagcatcgccacaatggcaacccagagaggataccagatggggcgctggcttgctggcagactcatgaaagagctggggctggtcagttgccagcagccgactcaccggtataagcgtggcggtcatgagcacgttgctatcccgaatcatcttgagcgacagttcgccgtaacggaaccaaatcaggtgtggtgcggtgatgtgacctatagtgtgcccggagttcagggcgggcatggatgcttaaatgaaccgcgagtctgtctggaatattgaaccggtaactcacgatgagaaacccaacaatcccaccgggtgtgacggtggagaacctgagcggcagtgacctgcggcatgcccgcagggtgatgtaacccgctgacaacggggattgaggcgagatcactaagccgagatgatcctcaaggttaagtactgaaaggttgaagaacatgaacccgttaatccgcctctgtgggttgaaaacgtcaccacggcctacgtgatctgacaggccgtgcaggaggaactggcagtgatacgtaagcactgccggtcgaaggtgttttgacatgtatgcgaaacaccggggcagcagcgtctatcacgcttgcgttgctgacttctgccaacttgcggcaagcaaggataaagagtgcgacgggcagcctcctcagtatgcctgagtccaggcaggtaaaccggggaaggtcagcgacggatgttaagggggcatggctccgatgacgcgctggctggcggagcttccgtagtagtccgcgatggggaaagcccattacatggcgaagggaagcagtttgaatgtgtttgcgacgtgaattaactgacctaacgaggtgaagacctttgataatcagcgaaatgcaacgcaagcttgccacatgggcagccaccgatccgtccctacggattcaacggctgctgcgtctgataacacaaccagaatggctggctgaagcggcgcggatcacgctttcatcaaagggggcccatacccccggcgttgatggcgtgaacaaaacaatgctacaggccagactggctgttgagctgcaaatcctcagggatgaattactctcaggccactaccagcccttgcccgccagacgggtttacatccctaaaagcaacggcaaactgcgaccactgggtatccccgcgttgcgggatcgtattgttcagcgggccatgctgatggcgatggagccgatatgggagagtgattttcatacgctctcatatggcttccggcctgagcgcagtgtccaccacgcgatccgcacggtgaaattacagctcacagactgtggtgaaacccggggacgctgggtgattgaaggcgacctgtccagttacttcgacaccgtacatcatcgactgctgatgaaggctgtacgccgcaggatcagtgacgcacgtttcatgactctgctgtggaaaaccatcaaggcgggacatatcgatgtcggtctctttcgggcggccagtgaaggtgtgccacagggcggtgttatatcgccgctattatcgaacatcatgctgaatgagttcgatcaatacctgcatgagcgctacctgagcgggaaagccagaaaagatcggtggtactggaataacagtatccaacggggccgaagtacggcggtcagagaaaactggcagtggaaacccgcggtggcgtactgccgctatgccgatgattttgtcctcatcgtcaaaggcaccaaagcacaggtggaagccatcagggaggagtgtcggggtgtgctcgaaggcagtctgaaactcaggctgaacatggataagactaaaatcccccatgttaatgacggctttatctttctggggcacaggctcattcgcaaacgcagtcgttatggcgagatgcgagtggtctcaacgatcccgcaggagaaagccagaaacttcgccgcatcgctgacagcactgttatggaaggtgcgaataagcggggaaattcttctcggctgactcagtcatttcatttcttcatgtttgagccgattttttctcccgtaaatgccttgaatcagcctatttagaccgtttcttcgccatttaaggcgttatccccagtttttagtgagatctctcccactgacgtatcatttggtccgcccgaaacaggttggccagcgtgaataacatcgccagttggttatcgtttttcagcaaccccttgtatctggctttcacgaagccgaactgtcgcttgatgatgcgaaatgggtgctccaccctggcccggatgctggctttcatgtattcgatgttgatggccgttttgttcttgcgtggatgctgtttcaaggttcttaccttgccggggcgctcggcgatcagccagtccacatccacctcggccagctcctcgcgctgtggcgccccttggtagccggcatcggctgagacaaattgctcctctccatgcagcagattacccagctgattgaggtcatgctcgttggccgcggtggtgaccaggctgtgggtcaggccactcttggcatcgacaccaatgtgggccttcatgccaaagtgccactgattgcctttcttggtctgatgcatctccggatcgcgttgctgctctttgttcttggtcgagctgggtgcctcaatgatggtggcatcgaccaaggtgccttgagtcatcatgacgcctgcttcggccagccagcgattgatggtcttgaacaattggcgggccagttgatgctgctccagcaggtggcggaaattcatgatggtggtgcggtccggcaaggcgctatccagggataaccgggcaaacagacgcatggaggcgatttcgtacagagcatcttccatcgcgccatcgctcaggttgtaccaatgctgcatgcagtgaatgcgtagcatggtttccagcggataaggtcgccggccattaccagccttggggtaaaacggctcgatgacttccaccatgttttgccatggcagaatctgctccatgcgggacaagaaaatctcttttctggtctgacggcgcttactgctgaattcactgtcggcgaaggtaagttgatgactcatgatgaaccctgttctatggctccagatgacaaacatgatctcatatcagggacttgttcgcaccttccggaggcgttatgagctggcggccctttttgtatctgattattaatccccacccgctattaagcgcccggcgcgggcatctgcgtctggtgcagggttgactttgcattctgttaacaaacgcggtataacaaaccttctttggatgtttagatgtccatacgtttagaaggttatatgcaaacaacacaacaaaatgcgccactgaagcgcacaatgaaaacgcgtcacctgattatgctttccttgggcggcgtgattggcacaggattattcttcaataccgggtacatcatttccaccactggagcggcgggaacgctgctggcctatctgattggtgcgctggtggtctggctggttatgcagtgtctgggcgagctgtcggtcgcgatgccggagaccggagcgtttcacgtttatgccgcgcgctatcttggtccggctaccgggtataccgtggcctggctttactggctgacctggaccgtggcgctgggttcgagctttaccgccgctggattctgtatgcagtactggtttccacaggtgccggtatgggtctggtgcgtggtgttctgcgcgattatttttggtctgaatgttatctccacgcgcttttttgccgaaggggagttctggttctcgctggtcaaagtggtcactatcatcgcctttatcatcctcggtggggcggcgattttcggctttattccgatgcaggatggctcgcccgcgccggggctgagtaatatcacggcagaaggctggttcccgcacggtggcttaccgattttgatgactatggtggcagtgaactttgctttttcgggtaccgagcttatcggcattgccgccggtgaaacggaaaacccgcgcaaagttatcccggtagcgattcgtactaccatcgcgcgactgattattttctttatcggcaccgtgtttgtgctggcagcgctgatcccgatgcagcaggtgggcgtggagaaaagcccgtttgtgctggtatttgagaaagtagggatcccgtacgccgctgatatttttaacttcgtgatcctgacggctattctttctgcagcgaactccgggttatatgcctccgggcgcatgctgtggtcgttgtcgaatgaacgtacgctaccggcctgttttgcgcgagtaacgaaaaacggcgtgccactgacggcgctgtcggtcagtatgctcggtggtgtgctggcgctgttttccagcgtggtggccccggacacggtatttgttgcgctgtcggcaatctccgggtttgcggtggtagcggtgtggctgagtatctgcgcctcgcattttgtttttcgtcgccgtcatctgcaacaaggtaaggcattgagtgaattacattatcgcgcgccgtggtatccgctggtgccagtattaggttttgtgctgtgcctggtggcctgtgttgggctggcattcgatccagcgcagagaattgcgttgtggtgcgggttaccgtttgttgcgttgtgctatggtgcttatttccttactcaaccccgaaacgcaaaacaggagccagaacatgtcgcagaataatccgttacgcgctcttcttgataaacaggatatcctgctgctggatggcgcgatggcgacggagctggaagcgcgagggtgtaacttagccgacagcctgtggtcagccaaagtgctggtagaaaacccggagcttatccgcgaagtgcatcttgattactaccgggcgggggcgcaatgcgcgatcactgccagctatcaggcgacgccggcgggcttcgccgcgcgaggtctggatgaagcgcagtcgaaagcgctgattggcaaaagcgtggagctggcgcgtaaagcccgtgaagcgtatctggcagagaacccgcaggcgggaacgcttctggtggcgggatccgtcgggccttacggcgcgtatctggcggatggctctgaataccgtggcgattatcattgtagcgttgaggcatttcaggcgtttcatcgcccgcgcgtggaagccttgctggatgccggggccgatctgctggcctgcgaaaccctgccgaatttttccgagattgaggcgttggccgagctgttgaccgcatatccgcgtgcgcgggcgtggttctcatttaccctgcgcgacagcgaacacctgagcgacggtacgccgctgcgtgacgtggttgcgttgctggcgggttatccgcaggtggtggcgctaggcattaactgtattgcgctggaaaacaccaccgctgcgttgcagcatttacacggtttaacggtgctgccgctggtggtgtatccgaactcgggcgagcattacgatgccgtgagcaaaacctggcatcatcacggtgaacattgcgcgcagctggcggattatctgccgcagtggcaggccgctggcgcacggttgattggcgggtgctgtcgcaccacgcctgcggatatcgccgcgttaaaagcgcgaagctgagggtttatcgggtctacatcgttcattgtaggcctgataagcgcagcgcatcaggcattgccggatggcggcacaagcgccttatccggcctacaaaaccacaaaacgttatgccgcatccgccagaacaaacatgccgtacggatggatttcaagataatactgctcgccgacgtccggttgcagacgcgtagcgttgacctgcaataatatctcctgcccgtgccattccaccgtcacttcatactgcggccccatataggcgacatggcggatcacgcagcgctggctctcttcgccgcgatcgctgagcgtgatcgcttccgggcgcacaccgaccatcccttcaccctgtgtaccaaagtgcagcgggcgcggcagatgatagccgtagatatcaacgtatccgtcgctgaaggttgccgggaacaggttggcatcgcccataaagctcgccataaagcgggaggcgggctggcggtaaagatcctgcggtgagccgatctgcatgatgtgtcccttgttcatcaccagcacagtatcagaaaccgcaaaggcttcgctctgatcgtgggtgacgtacagcgaggtgatatcaaactgcttttgcaactcgcggatcttgtcgcgcatgctgcgacgcaggttggcgtcgaggttactcaacggctcatcaaacagcagcactttcggcttgaggatcagcgcgcgggccagcgccacgcgctgctgctgcccgccggagatctgatcgacaaagcggtcttcgaatccttccagatccaccatcgccaacgcctctttgacgcgggctttcagctctgcgcgcggtacgccgagcattttcaggccataaccgacattctctcccagcgacatatgcgggaacagggcataggactgaaacaccatacagatatcgcgctgctgaatagagcgatgggtgacgtcttcgccatcaatgaaaatttgcccttcgctcggtttttccagcccggcaaccaggcgcaaaatagtggttttgccgcagccggacgggccgagcagcgtcaccatttgcccctgcgggatggtgaggttgatattgtcgattaccgtattactgccaaatcgtttagtgacgttgcgcagttcaacgaaatttttctgagtcatagtgcgctccattacgcctggtttttggcttttgaacgggaggtacgtgattcaccgatcagccagtcaaagatgaaaataatcgccagcatcaccacgatcagaatggaaccgtaggcaatcgctacaccgtattcgccatcttccacgcggttgaggatgtaagccgtcgctacgcgggtatccggcgtgacgaggaacacaatggcgctgacggtggtaatggcgcgcacaaagctgtaaatcagcgccgagaggatcgccgggcgcagcagcggcagcaggatgtgcgtaatggtacgcagggaaccggcgcgcaggctgagtgaggcttcatcgagcgatttatcgatttggcccggtaatgactccaacttattgatagtgttttatgttcagataatgcccgatgactttgtcatgctgctccaccgattttgagaacgacagcgacttccgtcccagccgtgccaggtgctgcctcagattcaggttatgccgctcaattcgctgcgtatatcgcttgctgattacgtgcagctttcccttcaggcgggattcatacagcggccagccatccgtcatccatatcaccacgtcaaagggtgacagcaggctcataagacgccccagcgtcgccatagtgcgttcaccgaatacgtgcgcaacaaccgtcttccggagcctgtcatacgcgtaaaacagccagcgctggcgcgatttagccccgacgtatccccactgttcgtccatttccgcgcagacgatgacgtcactgcccggctgtatgcgcgaggttaccgactgcggcctgagttttttaaatggcggaaaatcgtgttgaggccaacgcccataatgcgggcggttgcccggcatccaacgccattcatggccatatcaatgattttctggtgcgtaccgggttgagaagcggtgtaagtgaactgcagttgccatgttttacggcagtgagagcagagatagcgctgatgtccggcagtgcttttgccgttacgcaccaccccgtcagtagctgaacaggagggacagctgatagaaacagaagccactggagcacctcaaaaacaccatcatacactaaatcagtaagttggcagcatcaccgagaacacaaatgggctaattcggcagtactttcctaaaaagacatgtcttgcccaatatactcaacatgaactagatctggttgctgctcagctaaacaacagaccgagaaagacactgaagttcaaaacaccgaaagagataattgaaaggggtgttgcattgacagattgaatctacagcagctttttttaatatgtcccgttcgtcggtaacccgtttcagctctttctggagacggcggatctcggcctgagcatctgactgttctttattagtggaagaatccggaccgtacttctttatccaggcataaaggctgtgggtggtgatatcgagacgtgttgcaacgctggcaacagaataaccgagatcaacaacctgtttgactgcttcagttttaaactcttcgggataacgcttaccgctcatgggcacctctctttaagccattttaaatgactcggaggtgtctgttaaacccgtggcgattcaaaattgcgatatatacatacccatgactgcccagcgtatcggcttcaccagtcagcccgttacggtacagtgtgacacagtgcgcgtacctgggattcagctcacaggagagcagcatcagctccagatgtgcgacaaaatgcgggaaggcttcatccagttgtagagtctgcacctcactgaatgagccggtgaatccagcccggtcagccagaaaatgcagacgatgaccttcctgcaccagtcgtgctccgaaacacggtgtgatatctcgtttaagcccccaagtttgagtagagtctttattcataattttattcctgttaaagaagaccatgttcggcgaatgagaatatttgcctgccgccgacaatcaggtggtcggggacatggtgaacactttttaacatcctttacccatggtgatcgactttttcttcaggtcgatcacccccactttcgtgctgtaccaccacacctcgtagctgccgtcttcctgcatctccttcagcccgacccgttctcccctgaacgccttgcctgcgctcagacttacccctttcacgctcagctttccgctgatatccactttcctgaccatcaccccttcatcgtattccgggggcgttgtgttgccgctgtactgccgcgctgacggctgataccgcgagcccggtaccgccatatccagcgcctcgtgcgggcgttcaaggttatagaccgtccgccagtggtcgaaggcgcgctgcagttcaccgctgtctgcgaaccattttccctgcagcacttccgccttcaggctgcggtgaaaacgctccagcttcccctgcgtctgcggatgataaggccgggagtgccccacccggatacccaggcgcatcagccacagctccagcgccgtccaggtgccggtggtgtcgccccacggtgagccgttatccatggtcatccggtccggcaggccgtaacgctcaaacacgctgaccagctgctgctgcacggtctcgcgccgttcatcggtacagtgcgccaggcacagggaaaaacgggagtggtcgtccagcagggtgagcggatggcagcgtccaccgccaaaaggaaagtggcccttaaaatccatctgccagaggcggttcggcgcgtcgtgttcgaaccggcccgtggcgggaatgcccggtgaagcgcccggcagcaggccatggcgggccatcaggttatggacggtgctgaaggcgggcatggtgtgcccctggtcctcgagccagcgcttaatcttgcgggctccccagcgttcatgacggtcatgggccatacgcagcagggccgtgatgtcgtcagatgagcggttcggggaatggtgcggaatgcgcgggcggtcctgaagaccggcggcaccttcctgagcccagcgctggagccacttgtagccggtggcaggtgaaatgccgaagcgacggcagagggaacggatgttcgccccgtcctgcgaggcgaacaaaacaaactcagtacgtaatgacatggtatctctcgcatcccagggcataagcgactccataaacgggttcttatgccttagttgtaagtgtctaccatgtccccgaacaagtgttcactatgtccccggaccgtacaccccaaaggggagaggggactgcaccgagccatcttttccccctcgcccctttggggagagggccggggtgaggggcaatatgtgatccagcttaaatttcccgcactccctcttcccttccgatttacctctccttgttctgcgtcatagtatgatcgttaaataaacgaacgctgttctataatgtagaacaaaatgattcagcaaggagatctcatgccgcagtccgcgttgttcacgggaatcattccccctgtctccaccatttttaccgccgacggccagctcgataagccgggcaccgccgcgctgatcgacgatctgatcaaagcaggcgttgacggcctgttcttcctgggcagcggtggcgagttctcccagctcggcgccgaagagcgtaaagccattgcccgctttgctatcgatcatgtcgatcgtcgcgtgccggtgctgatcggcaccggcggcaccaacgcccgggaaaccatcgaactcagccagcacgcgcagcaggcgggcgcggacggcatcgtggtgatcaacccctactactggaaagtgtcggaagcgaacctgatccgctatttcgagcaggtggccgacagcgtcacgctgccggtgatgctctataacttcccggcgctgaccgggcaggatctgactccggcgctggtgaaaaccctcgccgactcgcgcagcaatattatcggcatcaaagacaccatcgactccgtcgcccacctgcgcagcatgatccataccgtcaaaggtgcccatccgcacttcaccgtgctctgcggctacgacgatcatctgttcaataccctgctgctcggcggcgacggggcgatatcggcgagcggcaactttgccccgcaggtgtcggtgaatcttctgaaagcctggcgcgacggggacgtggcgaaagcggccgggtatcatcagaccttgctgcaaattccgcagatgtatcagctggatacgccgtttgtgaacgtgattaaagaggcgatcgtgctctgcggtcgtcctgtctccacgcacgtgctgccgcccgcctcgccgctggacgagccgcgcaaggcgcagctgaaaaccctgctgcaacagctcaagctttgctgagccggacgataacgatgaccattgagaaaattttcaccccgcaggacgacgcgttttatgcggtgatcacccacgcggcggggccgcagggcgctctgccgctgaccccgcagatgctgatggaatctcccagcggcaacctgttcggcatgacgcagaacgccgggatgggctgggacgccaacaagctcaccggcaaagaggtgctgattatcggcactcagggcggcatccgcgccggagacggacgcccaatcgcgctgggctaccacaccgggcattgggagatcggcatgcagatgcaggcggcggcgaaggagatcacccgcaatggcgggatcccgttcgcggccttcgtcagcgatccgtgcgacgggcgctcgcagggcacgcacggtatgttcgattccctgccgtaccgcaacgacgcggcgatcgtgtttcgccgcctgatccgctccctgccgacgcggcgggcggtgatcggcgtagcgacctgcgataaagggctgcccgccaccatgattgcgctggccgcgatgcacgacctgccgactattctggtgccgggcggggcgacgctgccgccgaccgtcggggaagacgcgggcaaggtgcagaccatcggcgcgcgtttcgccaaccacgaactctccctgcaggaggccgccgaactgggctgtcgcgcctgcgcctcgccgggcggcgggtgtcagttcctcggcacggcgggcacctcgcaggtggtcgcggaggcgctgggtctggcgctgccgcactccgcgctggcgccgtccgggcaggcggtgtggctggagatcgcccgccagtcggcgcgcgcggtcagcgagctggatagccgcggcatcaccacgcgggatatcctctccgataaagccatcgaaaacgcgatggtgatccacgcggcgttcggcggctccaccaatttactgctgcacattccggccatcgcccacgcggcgggctgcacgatcccggacgttgagcactggacgcgcatcaaccgtaaagtgccgcgtctggtgagcgtgctgcccaacggcccggactatcacccgaccgtgcgcgccttcctcgcgggcggcgtgccggaggtgatgctccacctgcgcgacctcggcctgctgcatctggacgccatgaccgtgaccggccagacggtgggcgagaaccttgaatggtggcaggcgtccgagcgccgggcgcgcttccgccagtgcctgcgcgagcaggacggcgtagagccggatgacgtgatcctgccgccggagaaggcaaaagcgaaagggctgacctcgacggtctgcttcccgacgggcaacatcgctccggaaggttcggtgatcaaggccacggcgatcgacccgtcggtggtgggcgaagatggcgtataccaccacaccggccgggtgcgggtgtttgtctcggaagcgcaggcgatcaaggcgatcaagcgggaagagattgtgcagggcgatatcatggtggtgatcggcggcgggccgtccggcaccggcatggaagagacctaccagctcacctccgcgctaaagcatatctcgtggggcaagacggtgtcgctcatcaccgatgcgcgcttctcgggcgtgtcgacgggcgcctgcttcggccacgtgtcgccggaggcgctggcgggcgggccgattggcaagctgcgcgataacgacatcatcgagattgccgtggatcgtctgacgttaactggcagcgtgaacttcatcggcaccgcggacaacccgctgacgccggaagagggcgcgcgcgagctggcgcggcggcagacgcacccggacctgcacgcccacgactttttgccggacgacacccggctgtgggcggcactgcagtcggtgagcggcggcacctggaaaggctgtatttatgacaccgataaaattatcgaggtaattaacgccggtaaaaaagcgctcggaatttaattattttaagagataaaaccgtctgcggaatatttcccgcagacggctttgttgtttttgaaatttattaatttaaacaattagttgagatatatcgttggcgtcacaaaagcaaaataacgtaattcggaaataagatatgaccattgctggttaattgaatagctcattacactccattaacacgatgttgtaattcggcacactacataagggtgtaattctgatgacgcaattaaccatgaaagacaaaattggctacgggctgggagacaccgcctgcggcttcgtctggcaggccacgatgttcctgctggcctatttctacaccgacgtcttcggcctgtcggcggggattatgggcacgctgtttttggtctcccgcgtgctcgacgccgtcaccgacccgctgatggggctgctggtagaccgcacccgcacgcggcacggccagttccgcccgttcctgctgtggggggccatcccgttcggcatcgtctgcgtgctgaccttctacacgccggacttctccgcacagggcaagatcatctacgcctgcgtgacctacattctcctgaccctggtctacaccttcgttaacgtgccgtactgcgccatgccgggcgtcatcaccgccgacccgaaagagcgtcacgccctgcagtcctggcgcttcttcctggcggcggcgggctcgctcgctatcagcggcatcgcgctgccgctggtgagcatcatcggcaaaggggacgagcaggtgggctacttcggcgccatgtgcgtgctggggctgagcggcgtggtgctgctctacgtctgcttcttcacgaccaaagagcgctacacctttgaggtgcagccgggctcgtcggtggcgaaagaccttaagctgctgctgggcaacagccagtggcgcatcatgtgcgcgttcaagatgatggcgacctgctccaacgtggtgcgcggcggggcgacgctctacttcgtgaaatacgtgatggatcacccggagttggcgacccagtttttactttacggcagcctcgccaccatgttcggctcgctttgctcctcacgcctgctgggccgcttcgaccgcgtcaccgccttcaagtggatcatcgtcgcctactcgctgatcagcctgctgattttcgtcaccccggcggagcacatcgcgctcatttttgccctcaacatcctgttcctgttcgtctttaataccaccacgccgctgcagtggctgatggcttctgacgtggtggactacgaggagagccgcagcggtcgccgcctcgacgggctggtgttctccacctacctgttcagcctgaagattggcctggcgattggcggggcggtggtgggctggatcctggcgtacgtcaactattccgccagcagcagcgtgcagccggttgaggtgctcaccaccatcaaaattctgttctgcgtggtgccggtggtgctctacgcgggcatgttcatcatgctgtcgctctacaagctcaccgatgcccgcgtggaggccatcagccggcagctgattaagcaccgcgcggcgcagggcgaggccgttcccgacgccgcgacagccgcatcccattaaccggaggcaatatggaaatcactaacccgatactcaccggcttcaacccggacccgtccctgtgccgccagggcgaggactactacatcgccacctcgaccttcgagtggttcccgggcgtgcgcatctaccactcccgtgacctgaaaaactggtcgctggtcagcaccccgttggaccgcgtgtcgatgctggacatgaagggcaacccggactccggcggcatctgggcgccgtgcctgagctacgccgacggtaaattctggctgctctacaccgacgtgaagattgtcgactcgccgtggaaaaacggccgcaacttcctcgtcaccgcgccctccatcgaggggccatggagcgagccaatcccgatgggcaacggcgggtttgacccgtccctgttccacgacgacgatggccgcaaatactatatctaccgcccgtgggggccgcgccaccacagcaacccgcacaacaccatcgtgttacaggcgtttgacccgcagaccggcacgctctcgcccgagcgcaaaacgctgtttaccggcacgccgctctgctacaccgaaggcgcgcacctgtatcgccacgcgggatggtactacctgatggccgccgagggcggcaccagctacgagcacgccgtcgtggtgctgcgttccaaaaatatcgacgggccgtacgagctgcacccggacgtaacgatgatgaccagctggcacctgccggagaacccgctgcagaagagcggccacggctcgctgctgcagacgcatacgggtgaatggtacatggcctacctcaccagccgcccgctgcgcctgcccggcgtgccgctgctggcctccggcggacgcggctactgcccgctggggcgcgagaccggcatcgcccgcattgaatggcgcgacggctggccgtacgtggaaggcggcaagcacgcgcagctgaccgtgaaaggcccgcaagtagccgagcagcctgcagccgttccgggcaactggcgggacgatttcgacgccagttcgcttgacccggagctgcagaccctgcgcattccgttcgacgacaccctcggctcgctcaccgcgcgcccgggcttcttacggctctatggcaacgactcgctcaattcgaccttcacccaatcgaccgtggcgcgccgctggcagcacttcgccttccgggcagaaacgcggatggagttctcgccggtgcacttccagcagagcgcggggctgacctgctactacaacagcaaaaactggagctactgctttgtggactacgaggagggacagggtagaaccatcaaagttatccagctcgaccacaacgtgccgtcgtggccgctgcacgagcagcccattccggtgccggaacatgcggagagcgtctggctgcgggtggacgtggatacgctggtctaccgctacagctactcgtttgatggcgagacgtggcacaccgtgccggtgacgtatgaggcgtggaagctgtcggacgactacatcggcgggcgcggcttcttcaccggcgcgtttgtgggcctgcactgcgaggacatcagcggcgacggctgctacgcggacttcgactacttcacctacgagccggtctaacggctcaggccgggtagcccagcgcgcgcgagagcgcgagcccggcctgctgaagctgctcgcggaaattagccagctccgcgtcgtccacgcgggaggtcagcgtcgacaggctcagggcggcgatgacgcgggactcgtggttccacaccggcaccgccacgcagcgcacgccctgctcgttctcttcgctgtccagggcgtagccttgctcgcgggtctgcgccagggcgctcattaaggcttcgcgagacgcgagggtggcgggcgtaaaggtagtgtactgatagccctccagcagggcgttcagctcggcctcgcccagccaggcaatcaacaccttgccgatggcggtggcgtgcaccggcaggcggcggccgatgcgtgaataggcgatggcggccagcttgccttcaatcttctcgatatagaccccttcacgcccgtccaggatccccagatgggtggtctgcccggtccgccgggacagctccgtcagccagccttttgccttctgccgaatatcgatggagcccacgacaaaatggccgcgctcgaccagcttcatgccgaggcgatacttgccgttctccgggttctgatcgatatagccgtgaagctgcagggtttttagcagcgagtggagggtactcttgctcagccccatcagtttgctgatgtcggtgatcttaagctcggtggcctgctcgttgaacaggtcgaggatctgcaacgcacgttcaacagactgaataatcggcataatgctggcatgtccacgctggaattaaggcgaaaacgtacctttttcgggatgaaaaatcaatgaaatggagccggtgttctccctctccctgtgggagagggccggggtgagggcaccaacgcgcagcggacccaatcactccccaagcgttgccatcatcaccgccttaatcgtatgcatccggttttccgcctggtcgaacacgatgctcgccgccgactcaaacacctcgtccgtcacctccatcccgccgtgcagatcgaactccttcgccatctgcttgccgagcgtagtctggtcgtcatggaacgccggcagacagtgcaggaacttcacgttcgggttgtcggtcagcgccatcatctgcgcgttcacctgatacccgcgcagcagcgcaatccgctctgcccacttctctttggcctcgcccatcgacacccacacgtcggtatagataaagtccgcgcccttaacgcctgccgccacgtcttccgtcagagtaattttcccgccgtgcttctccgccagcgcgctgcactccgccaccaggctctcttccggccagcaggctttcggggccaacaggcgcagatccagcccggtcagcgccgccgcttccagcatcgagttgcccatgttgttgcgcgcatcgcccgcgtagaccagcgtcatctcgttaaacgccttgcccggcaggtgctcctgcatggtcatcaggtccgccagcagctgggtcgggtggaactcgttggtcagcccgttccacaccggcacgcccgcatactgcgccagcgtttcgaccacttcctggccgtgaccgcgatactgaatgccgtcatacatccgcccgagaacccgcgcggtgtccttaattgactctttatgcccaatctggctgccgctcggccctaaataggtaacgcgcgcgccctggtcaaatgcggcaacttcgaaagagcaacgggtacgagtcgagtctttttcgaagatgagcgcgatgtttttaccggtaagcttctgtacttccttgccattttttttatcggctttgagctgtgcggcaagggtcagcagagaagtgaactgtgcaggggtaaagtcgagcagtttcagaaagtgttttttgtataaatcggacattttatcctcgcatggcgaacgccacttattgaattaaaattcactttatatgtgtaattattcatttgcaaccccatttcacaattctttcttacaaaggtggaggcaaacccgtccgtgtgtgaaaataatcgtatctgcctccgattctctgcagaagcagaaagacattggatcgaattctacaaccaggtcgagtcagaaatgagaatgattggccttctttatgattttaaggattatgcttctaaaatggcggagaacatggcgaggcttgctgccttacttcattacttcagcggtgatggaggcgatatatctgttaccgggtaatgactccaacttattgatagtgttttatgttcagataatgcccgatgactttgtcatgctgctccaccgattttgagaacgacagcgacttccgtcccagccgtgccaggtgctgcctcagattcaggttatgccgctcaattcgctgcgtatatcgcttgctgattacgtgcagctttcccttcaggcgggattcatacagcggccagccatccgtcatccatatcaccacgtcaaagggtgacagcaggctcataagacgccccagcgtcgccatagtgcgttcaccgaatacgtgcgcaacaaccgtcttccggagcctgtcatacgcgtaaaacagccagcgctggcgcgatttagccccgacgtatccccactgttcgtccatttccgcgcagacgatgacgtcactgcccggctgtatgcgcgaggttaccgactgcggcctgagttttttaaatggcggaaaatcgtgttgaggccaacgcccataatgcgggcggttgcccggcatccaacgccattcatggccatatcaatgattttctggtgcgtaccgggttgagaagcggtgtaagtgaactgcagttgccatgttttacggcagtgagagcagagatagcgctgatgtccggcagtgcttttgccgttacgcaccaccccgtcagtagctgaacaggagggacagctgatagaaacagaagccactggagcacctcaaaaacaccatcatacactaaatcagtaagttggcagcatcaccgaattttcagcccggatgtttcacgtacctatgtcgaatatctggccgataaggttgcggatcgagaagaggatgcagaggaatatctggaagcaatcatggaggctcgtgttaccgttgctggcatggggctggtgatggaggtgcaggattacttcgatggcgaggccgatagactggcgaaggcgtggctggccgagtacacaccgcaaatcaagtcgttgaaagatgagcgtaaagaggcctatcgtcaaatcgtcgaaatgagtaccgaaccgcaggatgtggatctggtcaggccggcgaacaagtttgaaatgaccagggtgcgtgaaggtgaaaaggaagctgaccttccagtctggaaacaccatttgttgtgtgacgaaagcgggaactatccggctctgttgaaccattgggaaaccaaggtttttgagatcgaaaccaaacgtgaaggatttgctttctggtatcgtaatccacagtacacagggcagtcgtcactgggaatcgcttatgttgaagctgaacagtacaagattgttcgtcccgatttcctgttctttgccgaacaggatggcaaaatggttgtggacctggtagatccacatagcctacatctggctgatgctttgcccaaactggaaggacttgcgctatatgccgaacatcattctgatgcttacaggcgaatcgaatctgtcgccgaagtaaagggtaaattacgagtgttagatttgaaacggcaggatgtgcaggatgctgttgctaccgctgaaaatgcagaaacgttatttagtagcggacttgctgatgactatcagtaatctatagaaaattgcgtaacgaaactgcattttagtaattttttgaaacaatacaaataaggccttctcactgagaaggccattaccgacttacagttcgatttggctacagccgaagttacggtctccttcaccaaacactttgctttcaactttggtcaggtagtccagtcgggttaacagcgcctggtagttctgctggaagtcagtactattggtgtctagcacatacttacagttttcaggaaaatggaccagaccagggtgatcgtctctctccagtctcagggcgctgtaccaggctcctgtgatcatccctctaaggttatcgtcctgatcgtaatccccgaggtggtagtaagcgtctttgttgaacaacaggcaaatgtgatagtggcatttacctgattcagaatactctttcgcccatataataaataaagggcaacggtaaatgcgtttatcctcacgcaccttacgggtacggtcagcctccagcttagctctgagggattcacgcatccgggatatcaccccaggttccaggttagggaagcaacagatattgtcaccgttatcaactattttgggatagtggagatcgacacgtacagcaattaacctaggataccggttagtcaaataacataataatttattaatcttactctgatattcgaggatatgtactccatgagtaccttgatatgttttcataatatatacctgtatttggtcctacggtctatagcagaccgtacagggatgccatacaggcagggctattcctggtcactgttgtcggtatatactggtatcagattttagtacggacatactgatctgattactactcttactggtgaatacaggtagtaagagtacacaatgccattatataatacctatccaacatctaaatttgagacgaaggtagccccagcctgtgatggctgttaaaaagttactctgcaattagcttctggaattaaccgatgattccgttattccagtgccgcttcacagtcgataaactgatactcaatttctttgcaatctcagcctgagtaaatccacctttcttaagtattgtgatatcacgtcggtatttgcttccctcctttcgtcctaattttttcttaacatgtcgatatcggcttttagttgatttcagattgtgaatgtcaatcgtatcctgacgagcaatcaaaaaagacaagcaactttcagcagaaggctctatccttgaagctggatggtagctgtagataaacatttctttttgaaggcaaaaaaataaaatattctgtaagtcctccacagttctgccaagacagcttagatctggaatgacaagcgtgtcctgccggttcatttcatgatgaatcaattgtctgagtaaacgttgctctgaaacaacctctttaatatctacctgctcgatcacaacatgttcaggtagaatattaaatttttggcatatctcagcaagtgagtgatgatctgtaatgctttcttgctgttcgctactgcatatggtgtaaaaaaatgaacgcatctgatgcactccggtgtcataaattattttttgatacctgaataatgtcattttgcataaaaaacaaccaaaaatagagagtgattgccagcgatactttaactggtaaagtagtattttacctctcataattgtttgtccttctttgttacctcttaggttctgctctcttgtgagtatgggtttataatgatgtcatccggtacattaacacggttggaaacatctgttttgcggagcactggcagcataaccaccatttcattgacatggtaaatatcaatccaacaaacaaccggataaggcataacaatcccctttcttctaagaacttcatttatcccgaatataatcaattgggatgttgacaagagtagagcctgcccggcatcaaagtaataaccctcaaaggttgttctatgaataagaataatgtttgaatatcctgagacactttgatgctttacatcaaaatgtctttgattgtaaatgtaaatggctttttccatatcgtaattttcccttagcgaggatagcctttcacgtataactgttttttcatctttccccatgaattcatcattagcgttcagttgaaagtaatctgcaatggggatttttaatggactcatgatgttcgttttccagattaacgaacagtactcttccagagttacttctgttttacctcggcttcgattgatgctttcttttatagagaactttaacaggtcattttttatttcatttattgaccagttatgacgattgcatttttctaatatagggatagccaaatccacaacttccgctattacggaagagtgagatttatttgttagtctggcataatgatcaattactcctaatgaagattgatttttgaacgtgactgagtgtttttttatgggagtagtctgtactacctgtgactcattgtttttgccttgacaaggtttttttcctggtagaacgctgctcatctcaaaattagtaacactattagacatttttaaggaaacctctttgttatctcaatataaaactactatctgaaatttctcagtgttgccccatttttctcggggcaacatcgctataaatcaataaaattaaatctgtaatttattacagactttctcgtacagaaaatgtatctataaaatcgaggacatctttacgtaaccagtaatggcggccattgatttgttttgggcgaggtagcccctcaggcaatttgtcctgacaaagccatttacgaatggtttgagatttgtagctaatgattttagctaactcagctgttgaaatgagctgtgattgagatgtatccgggagtttgaatgcgctcattttgccacctcagtgattgagatattggcaaagaaagctttaagcattattgaattagtaggggtagtaatgaaggcagaaggaaacgtttcgggctcggggtcggggtcactaccatcacctgaatctgatgataaggcacttttagctgatttagccgtactgtgatgcgatctggatgcctgatttttacatgacatcagacgcgcgagaaagttagtagcattttgcattctttgtttaagatgtaaaattttcagtttggcgcatgcgacagacttgcgaagagctgagtatgttcctttgagatactcgacaacctcttccatggacgcaggatcgttaaaggattgagttgttttacttgaattaatacaccagcgagctctgatagctgccagagtgggttctatggatacagttgctggggttgccattggcttatctcctgtgtagttgctgtatcattgactaaactgtgtattacgatacatgaaaatctatcttgatcaatagttgatgatattttgtaatatgttgatttttaatggaatcaacgcatatcaacgttgttttttatggtaatacctgcttcatttaagatccatgtctcaattttctcgtgccattttcgtaacagatctaacggacgacggcgatagtgtttttcggcaagagcgctgggtttgtgtcccataatttgagcaacaataccagtgggaacttcaacccactcggccaaagtaccaaaactacgacgtaaaccgtgaaggctgatatgtggtaactcagccagcactaatgctctgttgtgcgctgaacgcggctcaataattttgccacttttactgttacttctgaaaacccaaccctccttatttacgtcagaatttggggattgcgctagtacatttaacaattcagaaacataaggagtgagagggatgatacgttcaccttcgatcttgtctttaattcgcatgcttgaccatttgaaatctacgtctgaccagcgaagcgacgcaatttcttcacgccgagcaccagtgagcaaaagtacttggagataggccgatgcaataggattattgaggctacgcacggcactaaaccagctttttagttgttccttttgcaggcaatcatcagctttactcgctgacacgggaaccatttttcttacgttgtaatcttgtgccagatcgccaggaatgatcccttgatattttttctgataattactccatttgatgaaagcacgtagtaggcgataagcgtgagcagtgacggtaggtctattttgcctttctgtactcagccacgctgctatgtaatctggggttagctccgataacggcaggttgagcaaactagccaatggtccagccgaagtcgggccttggcctctttttttactttcgcctccacgactggacaagttaatgtgatcggcaatgtatcgagtagaatatgggcgtttagtttttgcactgataccggttctcaattcttgaagatagtcttcccaggcgacggagaaagtcacttttgttttacgtgattctgcctgcagggattctgcttctgcgatttttacagccttagcaattcgtggatctatccctgtatcgatcaatgtttgtaaccgtcttgcctcggctctcgcatcatcaatcttccagtcgttaatgttgccaatagtcatgcgaagggttttccccgcatatacgctttggaatacaaaggcttttgctccgctagttgctcggcatgccagggttgttacatctgcatcccaaagaaaagtttgttttttcccttccggtaaggtgaatctgcgaagtctttcgaaggtaaatttttgtcttgaaagcgccatttttcggctccagttgagaattgctgtcttacaataatgtaactgctggtgtaagtaaatggagggaataaacatcaacttttgttaatttcaatcaacgggtttattgctataacttggtgttttataatataaagtatgttgttttgattgattgctcaagtagttaaaaatgcattaacatcgcattcgtaatgcgaaggtcgtaggttcgactcctattatcggcaccattaaaatcaaagagttaccccatatttaaatacaccacgtttcctcctgtgccgtatttgtgccattgtaaccttggcaattcatcaaaatactgttctgacatcaggcagtgcaggtgcagacatttaagccaattgctgccgccattctttgacgtagtcaatcagggcgcggagctttggtgcaatattgcgacgctgtgggaaatacagatagaagcccggaaattgtggaagaaagtcatcaagcagcgatacaagcttaccgctttcaatatatggcctgaaagtttcctgagtggcaattgttattcctccgccggcaagagccagcctcaacatcagacgcagatcattagtcgtaatctgcggttcaatcgcaaggtcgaaagttctcccgttttcttcaaatggccagcgataaggcgcaacctccggggactgacgccagccgatacacttatgggtatttcccccggaggcgagaaagcactctccacgcccggccgcaaggatcaggacgacgggggcaggcatgaatcctcctcctgatggagacgtacagaggcgacttctgccagcacggagagtgccagagtatgcgcatcccgggctttggggaatatcccgacgggtgcccggatttgcgttgtttcctccctggaccatcccagctcgtggagcttttgcagacgtaacgtgtgggttcgatagctgcccaatgcgccgagataaaagggttttgcttctcgcgcggcctgcaacactggcagctcccggttgagatcatggcacagcaaaatgaccgccgtatcggtatcgatctgagcgctggctgaggccggaaaaagatcgaagatatggctgtcatagcctgtggctgctgcaagactcgcggttgcctgcgcctcaagagaacgtccgtaaatcatcagcctgacgcatggcctgaaccccacctcaaagccattgagattccagcccgtccgggtttgcgtgggcaggcacaccagcgattgtgcttgcggatcgtagcgcagccccaccggttttctctgttccaggcggttcagcacggcgagcagaggctgtgccgagcgtagtttatggagcgtcagcgtgatcccaccgccgcagggcagaacgatgtcaaaccacggcgaaccttcgccatagcgaatttcgcgatcgcggcctgagcccatcatctccagcgcttcaaaagcggcagcggcctccacgcagccgccagagacaaaaccgcagtaacgaccatcttcgcgcaccaccatctgcgccccgagcgggcgcgccgcgccgccgcgtatctccaccagcgtcaccagcaccgctcctttaccggacattagcgcctctacggcgaagcgcagaatggtccggtggtcatcggtgagaaacgcctgctctggcttatgccagtgttcgtctttgtcaaaaagcgggtatgacattgttcctccttaaaccacatccggcagcttatcgagcagcttatccagagtgatgggataatcccgtacccgaataccggtggcgttatacaccgcgttggcgatagccgcgctcacgccgcacaggcccagctcaccgacacctttggccttcatcggggaggatatggggtcggtatcatccaggaaaatcacctcctgttttgggatatccgcatgaaccggcacctcataccccgccatatcgtgattaacgaagtagcccaaacggtcatccaccgccagctcctccatcagtgccgcgcccatgcccatagtcattgcgccaatgacctggctgcgcgcagttttcggattcaggatgcgtcctgcagcacacacagcgagcatacgccggacccgaacttctcccgtcgcgctatgcacgccgacctccacaaaatgcccggcaaaggtcgactgctggtactctttgctcagtgttccgaattcaatgctctcttccgctgtcagtctgccgcctgcggtggcttcatgtagcgtggcgcttcgggtaccgttggtaatcttgccgtcggcaaactgcgactgctcaggatcaaacccgactgccgaggcaatcatttcgcgaagcttcatacaggcggcgtaaacgccggaggtggaggtattcgcgccccattgtccaccagaacccgcagaaaccgggaaactggaatcgccgaggtgaaccgcaacctgctccagcggtacgccaagcatttccgctgccgtctgggccagaatggtgtagctgccggtgccaatgtcggtcatgtccgtttctacggtaacggtgccgttttgttcgaggtgaacccgagcacccgatttttccagcagattattgcgaaagcccgccgcaacaccgtggccgactagccactccccgtcgcgcacctgtccgggtgtggcgttgcgctgcttccagccaaatttatccgctccggtgcgcaagcactcgataagctgacggcgagagaagcagcgcgtcgggtcggcggggtcaacctgagtgtcattcaggatgcgaaactcgacgggatcgatgcccgctttttccgccagttcgtcgatcgcgatttcgagcgccatcagaccgggggcttcgccgggcgcacgcatggcgttcccttccggcaaatcaagcgtggcgagccgcaggccggtatgacgattcgccccggcgtagagtaattcgctttgctgtaccgccgtttccggcgtgccgccgggcaggtttccagaccagctttcatgtgagatagcggtgattttcccgctctggtcggcaccgatacgcaagtgctgaagggtggcggggcggtgcgtggtgttattgggaatagaggggcgggggagcatcactttaaccggacgtttcaccgctcgggcggcgagggccgccagcagcgcatcgcttctcaggaacagcttgccgccaaaccctccgccgatatacggggagataatacgcacattctccacgggaactttcagcgtttttgccagatcggtgcggcaccagtcaatcatctgatttgaggtccagagggtaagcttatttccatcccagacggccatcgaggcatgcggctccatcgccatatggctctggtccggggtcgtgtaggtagcatcaatcttcaccgcagcggaggtgaaagccccgtcaaagtcaccgacgtttttgtcgggcgtgtcttccggcggctgattgacggcctgtttttcgtccgccagggagtaagctcctttattacggcgatagtgtgcctgcaccagcgaggccgccgctcgcgcctgttcgaaggtctcggccactaccagcgcaatggcctgatgatagtgctcaatagtggggccgcctaacagcctggcggtgtttttgtcgcctttgccgagtgccccggcgttactggcggtaatgacagccagtacgcccggcgctttttgcgcggcgtccgtatcaagggcggtgaggcgtcctttggcaatggcggaaccgacgatatagccataggcggcgttgggggcttcttcatgccattcgtaggcgtagcgtgccgtgccggtagttttcagcggtccgtcgatgcggtcatggggacgaccgacaaccttcagctgatcgatcgggttttcccctgcgggtttatcaaatttcatgcctgtgccctcgcttcagccagtacggaggcaagcgttcgcttcgccaacaggagtttaaaggtgttttcagcggtgggatgggcgctggcgaacagcgtgtcatatacggcctgcgccccctgggatagctgagcatccgcagcctcaatgcgccagggcttatgtgctactccgcccagcgcgacgcgcccgctgccgtcaggctgaataatcgccgcgaccgataccagggcaaaggcgtaggaggcgcgatcgcgcaccttacggtagatatgttttccgccgagcggtggaggtaacgtcaccgcaacgataagctcaccgggaagcagggcggtttcaatgtgcggcgtttttcccggagggtgataaaaatcagccagtgtgatactgcgagtctttccctccggcgtgatggtttccaccaccgcatccagcaaccgcattgcgaccgccatatcgctcggatgggtggcaatgcaggcttcgcttacgcctaccaccgcgtgctgacggctaaagccttcaagcgccgcgcagccgctcccgggcaggcgcttattgcagggctgattggtgtcgtaaaaataggggcagcgcgtgcgctggagcagattacctgcggtggttgcctgattacgtaactgaccagacgcgccagcgagcagggcgcgggagagtaccgcgtaatcacgacgcacgcgctcgtgagccgccaggtcggtgttccgtaccagtgcgccgatgcgcagcccacccgcgtcggtcacttcaatcttatcgagcccgaggccgttcacatcgataaggtgggtgggcgtttcaatttccagcttcatcaggtccagcagattggtcccgcccgcgataaattttgcgccgggtacgcgctgagcgctaagtgccgcctcggctggggtattcactcgttcataggtaaacgccttcatgattttatctcccccgcagcatcttcaatggcggcaaggatgttagcgtatgcaccacagcgacagatgttgccgctcatacgttcacggatctcatcggcagttgtttctggagcggaaaccaaatcgaccgtgacgtgactgggaatgccgtcctgaatctcttttagcaccgctactgatgagcaaatttgcccggaggtgcagtagccgcactggaagccatcatgcttgataaaggccgcctgcatggggtgaagattatctggcgaacccaggccttcaatggtggtgatctcggccccctgatgcatgactgcaagcgtcaggcaggcattaagcctgcgaccattgaccagcacggtacaggctccgcactgtccgtgatcgcaacctttcttggtaccgatcaaatgcagattttcacgcaaagtgtccagtagcgtggttcgggtatccacctcaagctgctcggttttgccgttcaccttcagtgtcaggggcattatctctggcgcgggtgtagctgccggaacgcttgccgccagcgtagaatgaggataaaccacggcggtcgccgctgttgcggcgctcactttaatcagatcgcgacgggtcaaacttaaatcgtgcggctcgtgcttcccaacccgattatcttcggggtattcgccttggttgctcataccaggcctccggtattctaaaggggaaaataagagtgcgttgcgagagtgctgatgcttttttaaacgttaagcatagtcggcgacagcaggaggattattcttaaaacgcgaatgcagctatgagcccggctaataaattcatgttcgccgggatgttgatgatgatgggagctggtttattgctttagttgtacgatgcaaaaaccaataaggaaacctgtgattttcagctctacatcaccctgcaaatctctgtcacttctaatataaaaatagggagaaatgatggagcttatattcattggcgattaggaaactatcttgttatacaaaacaatacagttctttacatttgccttgttttatgaatactcctgaagaggtgtataacataatggtacaagcagggtagatatgaatatatttgaacaaactccaccgaaccgcagacgttatggtcttgctgcattcattgggctgattgctggcgttgtttccgcattcgtgaagtggggggctgaagttccattgccgccacgtagcccggtggatatgtttaatgcagcgtgtggcccggaatcattaatcagggctgcaggccaaattgattgctcgcgtaattttctcaatccaccgtatatttttcttcgagactggttggggctgacagatcccaatgcggctgtttatacctttgccgggcatgtctttaactgggttggtgttacgcacattatcttttcgatagtgtttgctgtcggttattgtgtggtcgctgaagtatttccaaaaattaaactctggcagggcttactggcaggtgctttagcccaactttttgttcatatgatttcattccctctcatgggactgacgccacctctgtttgatctcccgtggtatgagaatgtttctgaaatttttggacatttagtctggttctggtctattgaaattattcgcagagatttacgaaacagaattactcatgagccagaccctgagatccctttaggctcaaacagataatgcattgaatgataaaaatggcgcaaatacagcgccatttttataggttaaaaacattgctttttatattctgatgcagatagtcagtgagtatatcgcgctacttcaggatgatgtagatccgaagaacgctacagaagagaggcattgttgctggcaaatagaagaagtatcgggttttgttacccctgaaaaacgaagccccgctattatcgctggcggggcagtgcaattaattattgtatgtttataacggtgtcagcccgtatttagcccttgcacgattgcaagcctcattgacgactccgttctcaccagacatggcgaattctctgcatgtggacgatcgatttttatatatcgtgcagcaggcatttttgcccggggttcctgcaagggcaatacatcgggggtttttctgattggtaccgctcatgcatcggtgaaaaggggatatttgttcagtgagcctggcgggaatagtaccgccagcatcgtcggcttcggcccagtaaaaagagacgcggaaaaatgcacaacaggcaccacacgtcatgcatggattcagattgctcataattcaccagtacagctaaaaatcgtaaagagaacagcggtacatcgtatgtaagaacgtaccgcggttggctggggaactttcgatagtgtgagtattgaatgatttccagccgttaccgattttacgtactaattcgtgattaaaccactcgttagcaggctgcctgatacctttccgtgtctcctgaacactatggtgtgcatatgagaaagcccatcgttacaggtgatattgacgatcgcttccacatcatttaaacgatttttggggctctgaggtggaattcttccctcgaccgatggataagtcttagtccgccgaagggggcttagccggacaggaatcgctaatcttaatgaatttgtcgttatagaccagatagtgattccccggctgacgtaactcaggctgatgaaccacgtctcccggacgtagataccaggcatcgccttcctcttcggtcgaatcacatcctggcttaatcagtagcttaaaccatgtgttgccagtgttacttaccgttcctgtcaccttgtcgaaggaccatttaaactgaacctgacgtggtcgtactaccagaatggtatccatcaccaccaccggctccgtgctgaccacgccgccggttgggctgcgtcttgtatggttacgagtggggacctcgcgaaatgagacccggtagtagcgctcgcggttatcccgtggaccatgatagtaaaatttaaaatactcgctctcaccagcctgcaacgccagctggcggggggcgaaaagcagttcaccatccaccggtcgggtgcgcaattcactgctgcccgggctatcaatagcactgatggcaatacggtatatccgtgcgcttttgttgttattcactacacgtttgctgacaaagtcagtctcggacggcagcgaaaatgtcagattgccgaccgaaatcgcctgtgtcaaaggtgccgccagcatacagaccgctgtcagcagggccttagttaatgttacgccacgtcgcctgaacatgaatctctcctgaagcgctgacttcgccaaaccagccgttatcatctaccgtacgcagcgaaatggcgttatccattggaatcgaaaatttgactgtggtcttatccatctgccccacttcgccagagatatcagtccacggtgtggtcaaccacagcgcatcggtcatatcccgccagctatcatcgcacccggcatcgtaggtttttgtagctccgttgcgggtaataaaggaaagtgtcgccgggaacggtactttcgccttaccgtcatcggagctgaagacacaataggagcgcccgccaatcacctgcgcgggtccggtcaccttgatcagcacttcgtcggcagctgttttaccgctggtggttacgatatagccgaaatcgagtgccgactcgccgctgccaacatatccctcccgcgacggtgtctgagtatattcatcggagataatactgatgctgaaatcacggggtttgataatcagcgtgttggaggtagaaaattcataccagccagactccggtgatgtggtgttctgaaagcgaaagttgaatagatctttggtgttgatatcgctgatcccgaggttcaccatctgcttaaagaagttgctcgagaagaaaacatagatcgagtctgcgctcttcatctcgttgaaggtgtagtaataggcggtattgctcaccggtttccatgaactgccattcagactgaactgcatatcgtacgccccgacggccgaggctaacgacgagttggcgatcgccgggaatatatggattgaggtgttgctgagtccgtttgtttgcagggtatagttaaccatcttacaacttaatcctgaacggctgccgatggtttgcgtccggcagtcggcgttcccttcgcccagagtcggtactccgtcgctgttgataaatacttccgccagcgagtgggtatttatcaaccgtagatttgctgctttcgtatgggtgacgttgcgaacataccagttgccggaggcctgatccttacagcgtgcgccgctgctggcgtcatagttcacagaggtctggcaggcattgatggtcattgtaaagctgctgccgacgggcatttgttgcatatactggtaaaacgcgtctgacaacatgccgtgcatccacttcgcgccgccgctggtcaccgtcgcgccataaaatccactggcgtcggtggtttgcggcaggataagactggtggtcatattacacccagcgtaccagttgatgcagcgcaagccagttaaaggagatgaaactggtgaattttccagccacatatcaaacttccagttggtataaaggccggtgttgtaaccgttatcaatgtagccgaggctttgctgatagatggttcctgaaccagtgtattttaaaccggtccagcggttggcaccggtcaggcgcggatccagcgccccgccaggagtgacgaaaaagttgtcgtctgagttgttttcgacaaacacaaactcgcgtgccggtgcatccgcccaggttgttttgctcactgccgctctgagcgcagttactggccagattagcgcgaaaattatcatcgttattagtaggttaactctcattctcttctcctgtctgcgtcaccgccgcccacgatgagaggccgctgcagaccacatcaccgacccagacggcaccgcgcgcctggttgagttccagagccacttcgcaggttttattgccactgtagcgaaaatcgatagtggggtatttcttatccacgtccatgacaaactcgccgttttcatcggttcgggttcggccgatatggttgttaatccgtgcgttagccagcagtgtgccgtcttccgcacggatacgaccggagacggtaaccatctgcttcacctctggctcaatgacagcgacattgcctggatagagagtcagacgacttttgcggccgctgacgatatcgtaactgtcgagtgagtttttgctgttctgtaactccacctcatatcttccatagggagagagcgggagatagttacgcttgccgttaagcgggaaaatccgcccgttgattttggcgctgatctgaccgtcgtcctccagcccggtgttgaatatcaccccagcgttgccatcagtccgcccgctggcagcaatgtttttaccctgccagccgacgctgccattggcggtcaagttggtattgacgtagccgtccgccgcgctattgacgttcagcgttccgctggcgtaacgagcgtcgaattgtgcatacgccccgccgctgagggttttgtcatcaccggtatcgccggagatggcacgtgacagattggcaccaacagtgcgaatggttccttcatcaaactgtttgcgtgctgacaggtttgccatggtgtagccgttttgatgagtcatccctgcgctaaaccagttgcccagtggtagcgagagatcgagagcgatatattttcctgtattggcgttgctgtcgccgttgttatagcgctgaataccggcccgcaggccaagcgaaccaaaggtaccgctgtagacattttgatagtaatctgccgtgtaataatggctgttgtaacggcggtcatcattgtagctgatgctgaatgtgcccagcttcgaccacagtgagttcaggttgagtgtgccgccgattgcacggttgtcggcatcgctacgtcgcaattgattgccaatgcgggttttttcctgattaacccacagcgaactaaagcctcccggtagagtggcgctgatgctgccgatgctgctccatgagctgtcactggccagcatattttgcaggttaacgttgatcgcccccccaagcggcagcgtcagacgggtttcacccaccgcctgattatcgtatccatatcccgttgccgcccagctaagcgtactcaatgagccggaggtcgaggcacctgctagccaactctctttagctggtcgcgtctttttcccgttttccgaccagcgatccatatgaaagctaccgccccatacctgccacgccagtggtgcaccgacgccgcgcccccggctaaacagcttattgacccgctgggtgcgtttgctgatcacgcgaccgttaacgatcacctcaacttccacatcgtaaatcccgtacggtagaccccgggtatccacttcatgattgcccatagtgaagttctgaacgcttagtagccgcccatcacgggtgagatgtacttcgcccgccgccggtaaaaaggcgatcactggcgtggctgactggctgctgtcgaagatggtggagctggcctggtttccccaggaaaggccgtaaatcttccctgctgaaatggcggtcatcggccctaaggactgcaagttccaggtgtcgagcattccaccggcaaatcggtgaccggcaaaatcgcgttcatacatcgctttatataattcactgtcctgttgaccgctaccgatcccgtacagcgagccgtcgagcaccacatgatgttcgcgcagtgcagtaacgttattcagcgacagatagctggatgtgttgctcccgccgttacgcaactggttgttatagacgcccaagttatagctcagattactgctgagggtgttaacactggactgcccgatgtcttcgctacgtgagcgtagtacggtgcccagcgcttcgcgcttgaccactagctgcagcagcagttggcgcaagctgagatccagctgcgcgttgtcagtcagggggatggtaagggcctcattgaacggggcgttggccagagccatcagctgctgtcgagtttgttcgctgacactggcgttatcttcactctcttccagctgtattttccggatgcgtagctgtccatcgtccagccagataaaagcgctgccgattcgctgatcgtcctggcgaccctggctaccggcgagatgaatatagagcgggacgctcatgccgtcctgaagcgcctgactgaaggcctgcggaataatcaccccacctatttgctgcgcacttatgtcagcagcgctggcatcgggctgaacgaacaaaaagaccatgccgaaggcaaactgggctttcagtcctggggagaaccgtcgtaaaggcattgtcgttatccatctgcacagctatctatttcacgggaatgaacttatcaccctgccaaagtgcaacccgtcctttgttatccgcagtgtccacgcgggtaaaacgacgcgacttgcccggcatcaggtagtaattctctttacactccttaccgttggcggctttcaggcaaggtccgtaggcgaggatccgcagcgtcgcatttcctgtatttgtcagggagccgttggcgtactgaaagtggtagttcgcctgacgaggggcgacgaccagaatggtgccgatgcgggcggaagcagtggccacagcgctgcggttggcattatcgcgctgcgcatcactgagggcctgatcaaaccagacaatgcggtagtagcgctctttttcatctgcgggtcccttatagaagaagcggatcacttcgctggcttgggcgggtagcagcaagctggcgggagtgagtagcaactcatccggcttgtccattgagataacctgcccgtcgtcaagcggtgaagagagccgttcgagacggatattgataaggcgaccactgtcggtactgtttttgatcgttttgctcagcgtgctgctgtcactgttcataaacgatgatatatcgccgacatccagcgcctgggccggagatattccggaaaacagcagagcgagaggcagaaggtgctttttcataacaattccgtccaggaataaagcaggggggctacccctgctggtacatcagagagattaactggtccaggtcgcgtcgaactgtacgctaacgtcgccgctccagatgccttccggtagagtgctgtaatctgttactgcggtggtaccattggtggtaccgctgatgatggagaaggtgaaaccatcctgtgcggtggtacgattgctggcattgtaaccgttagccagcgggctaaggttgccgcccagtacgccgttggcggtatcgatcatcacggtatcgccagttttttcgactgccgcgccgttataatccacgcccacattcagtgtggaacctgaggtatccaactgggttaatgtgttggtgataagacgtgaggtcagtttaaaggcggtagccgttgagtcaccctcgatagccacgtcaaatagacctttctgtgagttaaaacctttaatgccttcggcatactggaacgccaggctaccgagtggcgtcacaaccagcttactggtggtgtcttttttggctgttgccgaccaggtcgctacagcctgagctgttacgtcagcagcctgcgccacacccatgccggtaaacaccgttaccagagctattgccagaaccttttttttcattgcatttcttcccgagttgaattgaggacgtgatgtcccagtgagtcattttttaaaactaacttgcctggagtttactgaaccaacttatatatttttgagtacagcttggcctcagcattacgccgatgggtatacactgtcttcacactacaattttcaattctggcaatcgatttaggttgcattccctgggccgtcatgcggataatttccatttcccggtccgtgattttatctttcttaatatcttttctcaggaacctgccattaatcacatagaccagttcttttctaatatcacgactcagtccagcgtataccacgcccctaatattgctattgtaataccaataatttgctaaggcctctgactttctggccgcaatcaatacgacctgtttcccctttaccgcggataaccattcattatcacggtttataaattcagataaagaatccgtactgagattgataaacacgaaatcttttctaattttctccaacgatagataaattaatctgtcgatatccacaatcagttcagatagtcctttatagaagtaggcgtcatggggagaccagatgtatttatcagaacggttttgacattccatatggtttttaacctcatagtccctactgtaatcactttgccatgtcactactttccaaacctgtaatttttacaggtgcattcagtttccttagtaaaccggaagtaaataagatacgtagtacatatcaataaaggttaaacgagattaagtttaattattttcgattgggcttaaatttatgtttttttcccgatgagtgtcaatatgtgaacggaaaaggaattcaatggttaagtcaatatttagaaaaactgaaaatattgcttttttgataagaagaaaaagacatttggtttcataaggttattggcaatataacgttcaattcttacttgcattttatattggtcaggaactttgccctgaagtgttaggaatagtcttaatgcgctgtgtgatggactagtaaaaaaacaagttttaagggtaagggatagaatataaaactatgatgagctgtcattgaagatgatttgccaatcagtaagatattttaatggattaacatgccgcacaaaatggttacaggtgttcattccaataagtaatggaaaattgaacgggcgtatgtacgtcatctgttcggtaagcccccaagagccagattaagtgaagttaaacgaaggctgccagctgtcacaggaacgatggcctttttgtcagggcactgcattcagttatctgtgcgcgttactctaactggcactcgaacgtcggcgacggggttaccggtggatcagactgttcctgtggcgtaaacgtttttatgttagtaccaacagatttaccacatttatcatcttaacagtttgagtgaaaatgcaggctgcgccgcaaagggaggagactgagtggcgtgttcagtctaaaagagggttgatgccagcatacaggggcgaagctggtcaacaagtcaacattaagataatggaatattcggagagaaacgtcaggcagttggcctcaaatgaacaggaagaatatatccccaggaaaattaatgttggtgttataaacacaccaacattaatccgatctgattattaatcagacaaatatcgttaatccgtcgaattttgaatcaacgttttttcttacgaccctgaacggccttaaaacgtggattagatttacaaatcacatatagccgtccttttcgcttcacaatctgacagtctggatggcgttcttttgcggtacgcagagagttaagaactttcatcacgccccctttttcgtgctaacaaaacgaccaaaacgttgggtgaatcgtgcaacatttccttctgatgccactgttctcagcttccctgtatagaacgggtgcgatttagaagagacatcaattgtcacgtatggatacgttacgccatccagctcaatctcacggtctgttttgatagtcgagccgattttaaagtactcatcaacactggtgtcgtggaacaccacagtacgatactcaggatggatattgggcttcatcatttttacctgttatgttataacataaccataaagatacatgctcatccggatcatttcaacactcaatccctgtgactctttgtggatgtggaattttcgcaacggggaactctggcattgttagcagccattggtgacgctcccataaacgcctggatgagtgattgatgatggttttgctgagagtatggatttttcgagaatggaggttatctccactttactggccgataatttatcgcagtatgattgattacctgacagcgtgtattcctctcccacggatataataattacttacaaaaaagggagaggatgcatattttaaatatcactgaagtgaacagtttatttccgttattaatagaaatggagaaataaataggcgtattctacaattgcgacaaaaacaacgatattaatcagtttatgactgatttgctgtactttattctctttcattggtacttcctcgctttaaaaaagagtgcacttcgtaagtgcccttatataaataacgagtttggtcaaccaattttttgacatgtatcacaaatttgaatagatgtattacatcaactatcttttattgcaccaacgtcattgatatatgtcgcctgaagtcagttccgggaatgagtctgatctcaagactggcccagtccgggcgttgattggtgctgaggagcatatcgcatctcatcataatgtcgtatctcctggggtgttatacaagatatcgttgttggtgacctgggagaggaattgagttctattaaaccgtcaactatgccggatacatactggattacactgcaggcacgccttatgagagaacgtgccgcagtgacgggttaattatctgaaagaatttgtgaggctgtatcggttactcattgatttgatagttttactctcgggagaataatagatatttaatccattaacggaaaccagccagttcctttcgatgcctgaatttgatcccatagtttatccggaatggttaattcatgaacaagttgtgttatcgttcatgagaagcataacgtaaagggaaaagctcgattagacggcagaatttgtcaggggttatgaacgaaattcataaatctgtttgagtgttgcgatgggtagtgcaagttcgatatctccgcaatttacagtccgatgaaggaaaatgaatatccataaaaaatatattggtttatcctggcatatatacctatttcgacgtatttccaatagttttaattaaaggcaggtcattgttattcactctgaatagtgaattattcactgtccgcagagtaagaaatataacttaggtatctatttaatgacttgcacaaaaagctaaattttcccccataaataaaaatataatcccgcgcccaaccacctgatgagtggctataggcactggatatattaggtggcggtgcactttcttacataaaggtatttccttttctgcggaaaaggaaatcgggaaatccccggtttttctgacaagcagacgccattatttgtgtctgcctatgttcgttaattcgttcatcaggaaattatctcaatgtcacattataaaacaggtcataaacaaccacgatttcgttattcagttctggcccgctgcgtggcgtgggcaaatatctctgttcaggttctttttccactcgctgtcacctttaccccagtaatggcggcacgtgcgcagcatgcggttcagccacggttgagcatgggaaatactacggtaactgctgataataacgtggagaaaaatgtcgcgtcgtttgccgcaaatgccgggacatttttaagcagtcagccagatagcgatgcgacacgtaactttattaccggaatggccacagctaaagctaaccaggaaatacaggagtggctcgggaaatatggtactgcgcgcgtcaaactgaatgtcgataaagatttctcgctgaaggattcttcgctggaaatgctttatccgatttatgatacgccgacaaatatgttgttcactcagggggcaatacatcgtacagacgatcgtactcagtcaaatattggttttggctggcgtcatttttcaggaaatgactggatggcgggggtgaatacttttatcgatcatgatttatcccgtagtcatacccgcattggtgttggtgcggaatactggcgcgattatctgaaactgagcgccaatggttatattcgggcttctggctggaaaaaatcgccggatattgaggattatcaggaacgcccggcgaatggctgggatattcgtgctgagggctatttacccgcctggccgcagcttggcgcaagcctgatgtatgaacagtattatggcgatgaagtcgggctgtttggtaaagataagcgccagaaagacccgcatgctatttctgccgaggtgacctatacgccagtgcctcttacccagcaatagtggacacgcggctaagtgagtaaactctcagtcagaggtgactcacatgacaaaaacagtatcaaccagtaaaaaaccccgtaaacagcattcgcctgaatttcgcagtgaagccctgaagcttgctgaacgcatcggtgttactgccgcagcccgtgaactcagcctgtatgaatcacaactctacaactggcgcagtaaacagcaaaatcagcagacgtcttctgaacgtgaactggagatgtctaccgagattgcacgtctcaaacgccagctggcagaacgggatgaagagctggctatcctccaaaaggccgcgacatacttcgcgaagcgcctgaaatgaagtatgtctttattgaaaaacatcaggctgagttcagcatcaaagcaatgtgccgcgtgctccgggtggcccgcagcggctggtatacgtggtgtcagcggcggacaaggataagcacgcgtcagcagttccgccaacactgcgacagcgttgtcctcgcggcttttacccggtcaaaacagcgttacggtgccccacgcctgacggatgaactgcgtgctcagggttacccctttaacgtaaaaaccgtggcggcaagcctgcgccgtcagggactgagggcaaaggcctcccggaagttcagcccggtcagctaccgcgcacacggcctgcctgtgtcagaaaatctgttggagcaggatttttacgccagtggcccgaaccagaagtgggcaggagacatcacgtacttacgtacagatgaaggctggctgtatctggcagtggtcattgacctgtggtcacgtgccgttattggctggtcaatgtcgccacgcatgacggcgcaactggcctgcgatgccctgcagatggcgctgtggcggcgtaagaggccccggaacgttatcgttcacacggaccgtggaggccagtactgttcagcagattatcaggcgcaactgaagcggcataatctgcgtggaagtatgagcgcaaaaggttgctgctacgataatgcctgcgtggaaagcttctttcattcgctgaaagtggaatgtatccatggagaacactttatcagccgggaaataatgcgggcaacggtgtttaattatatcgaatgtgattacaatcggtggcggcggcacagttggtgtggcggcctcagtccggaacaatttgaaaacaagaacctcgcttaggcctgtgtccatattacgtgggtaggatcataaagtcctcgggtcgttgtccactcttttggcatgtcagcatattcacataccgtaccagcaaaagtttcaaccgtgagcaaatcgaccgattttgttgacggttcaaacgtggaaacgaaatagatatccgtcttaaaattcttcatacatctggctaaatgatgacgtcgtagtttgacttcttcatccggtgatttattcgacacttcaatgtcatatttaaatgagttgccaaaaataggtgtctcaggaaagttgattaatctacactccgtcttttgctgttgacgtattaaaaaagaagggaagatatttgcgagatcccaataatcacggtggcggtattcacggggagagcagccgaataactttttaaattcgcggctgaatgactgctgtgaatcaaaatgcaaagagagtgcaatatcaagcatagatttcgcggtgagccggacaagaatggcggcacgacaaagccttcgtttgcgaatgtattctcccaaaggcacatgcatgaaatttcggaacagaagctggatgttgcgtctgctgtagccagatttctgtgcgatatcttcgattgaaatagggtgctcaagattgcactcaatccactccaggagctgctgtagaatcttctgcctgatcatctcattctccgttaattctttgtcatatcgcacattttcgttataccctgggccctaagtgtatcaaaaatagcaagggcgaaggcaaaagcactggtagcgtctgcttcgttgtccccgaaaatagagaggtttcagtcctacattattaatgaattttttgcataagtgatatcaaaatccacatactactttgaggttacgttttaacgtagactcattgttcatgcctaatggagggactgacagtggaattttccgtatagtctgcttcagagtattgcagatgcccatcaaaaatcgatttctcactgacagataaagaaatggcacaaattagttcgcttgatttgggttatgttggggagtcggtaaaacattttaatcctgaatttgttcgtggttgtcttgctgtaaaaatacatgattgatattaatcatgtattttacctaagacgacaaaaaccttttaacagggagtgatattgatcttcactctgtcatatctccggtaatatggcgtcaggcttcatcatcagaaagggggcctgacgcctgaaaaagtgaacaacagacagtgttcggattatcaatattcagtttttaacgttgaactggattcattactgcgttgtttaagaatttcccgcgccgaatctgccattatcatgactgcacctgccagcatcagagtatctttcaataccaggcgaccagcaccggataaataagggaaaccatgatgagcgtcacccaatgcgggtacccatgcctccggggtggtgattaaaaatgagagtgttaccagcggcgtggtaaatgccatcagtcctcccaataaacctaaccagcgattgacaggattagccaaaaccagcagagcaataatcacctccacgacgccaagaccgttggaaaaaccataggtattattggccgtttgccatgcccttgcttctggtttgtattcgccttcgtgagtcagatactgtttatagtcttccgggtgttcataaaagaacgacattagtggactgtttgcgacgaatggtgtaatgctgtctgcctcgtaagggacaaactttaataacccaatccacataaaaacaattgcaatactcagacgaatcaatgtcaggccaattttatctccccgacttaacaggtgcaggtatttttccattgtgaacatccttatttatacaatactgctgttgcggttgaattattatcaattcgcatcgatgtgactttccaggatgaagcattatattttctggctatatcagcaatggtatcctccagaactgtcggtgatgctgatactgacgagacgctgatatgtttcagaattattttatcatctgcattggtggaaaatgccataacgccagataatagtgttgcaaataaaacagattttttaaacatataaaataccatcaatgaagtgattaagaagttatagagtaacagagaattaataagattcttttctctgagacgccagaatatttgttctggcgtctgattttgagtttatttgactaatgaaaatagatcattgagtgattcgctcatcgacggatgagtaaatatctgatcgcgtaatatgctataaggcagcccggcatccatcaccattttcactatattgatcatctcgtgggagtcaacacacagcagtgatgcccctaacatacgttgggttttattatcaacaatcgcttttaataccccacgagtatcattcatcactctggcacgcggaattgcagctacaggcaatgtcaccacctgaatatcagcaccactctctctggcttgttcttctgtcataccaaccctggacaggggcggtgtcataaatacggaataaggcacatttttccgatcatcagtactacgtttgccttcacccagtaactcatcacgtacaatgcggtaatcatccagtgatatgtaagtaaattgcagcccgccggtaacatctcccatcgcccaaatattgtctgcggtggtatgtaatcgcttgtcaacgacaattgccccgcgctcgtttactgcgataccggcattttctggatgtaacgaagcggtagccggttgacgaccggaagctattaacagtgcatccaccgccagttgggcgtgctcgctatgcacttgcacttgattttcatggtgactgattcgctccacatgggcattgaggataatatcgacgccctgatcgcgtaaaatcgtcgcgatattatcagcaatatcccgatcttcccgaggcaaaaacagcgaagctgcttctaaaatggttaccttgctgccaaaattagcgaacatagaggcgaactcaacgccaatatatccgccgcccaaaatacctaaatgcccaggcaattcttttagattaagtaatccggtgctgtcatatactcctggcgtggtggtaattccaggaattggcggaaccacggtttgtgcaccggtattaataaaaattttctcgccatgaatttccagatttccctcaggccgatgaacacgcaggctatgattattgataaactccgcctggccgtcgatcacgtcgatattgggcatatccgcaagattatgaaaattcttattacgtaaaaaattaaccacttcatttttacgctgtatggcacggacaaaatctgtgtgctgctgtgcgtcatgaaccaatgttttggttgggatgcagccgatattaatacaggtcccgccatacattgcatttgattgttcgatgagagccactcgccaacctgcttttgccagcgtgacggctaatgtttttccagccttgccaaaaccaataatcactgcctgatatttattcatgatgatttcctgtcgaaacgcgttcatttgacatcatgactatagacgcaaaagagcaaataacatttcttcacaacgcttgatattttgtcttatcgtctgatattttctttttcttaatcagaatcacaaaacaaaaatcatgattaactatttgatggtattagattagttatttactaagattgttggtgtttgtaatcaaaaaccactcaggagtctgatatggatgcccttagccgtttgttgatgcttaacgctccacaaggaacgatcgataagaattgcgtgttaggaagtgactggcagcttccacatggtgccggggaattatcggttattcgttggcatgcgttaacgcaaggagcggcgaagctggaaatgccgacgggggagatttttacattacgcccgggaaatgtggtcctgctaccacaaaattcagctcatcgcctgagtcatgtcgataatgaatcgacctgtattgtctgcggcactcttcggttgcaacattcggcgcgttattttttaacgtctttgccggaaacgctgtttttagcaccggttaaccacagcgtggaatataactggctgagggaggcgatcccgtttttacaacaggaatccagatcggcaatgccgggagtggatgcactgtgtagccagatctgcgctacattctttaccctcgcggtgcgtgagtggattgcacaggttaatactgagaaaaacattctcagtttgcttctgcatccacgtcttggtgcggtaatacagcaaatgctggaaatgccaggacacgcctggaccgtcgaatcgctggccagcatcgctcacatgtcccgggcaagttttgcccagcttttccgtgatgtttccggaaccacgccgctggctgtattaacaaagttgcgtctacaaatagcggcccagatgttttcccgggaaacgctccctgttgtggtgatcgctgagtcagtaggctatgccagtgaatcatcttttcacaaggcgtttgtccgcgagtttggttgtaccccgggagaatatcgggaaagggtcagacagcttgcaccctgaataaaaccgccagaaatcagggcaaagataatccgcattccgggagttgtgagcctttcaactatttctatttccaacggtggtttgggctttatatattttttctgatggactctagctcagtttttaaataaaaatgcaaactaaattgcttcaattaaataaaatcccgactattacttgatacgtgattattgtcggtgatttttttgtacaccatcagtgtatatctcaataacccctgaataagtagctctgaataggtataagggatgtagccatttttaaatggatttcttatgccaaaaatgatcgtcgatttccccataaaatgtgagcgatgccgaaagaaataaaattagttattgcatttgacgtttggatgaaagattatcatttgtcatacaaatgaggggtggtatgttgctagccaattaaaaaagaacgccatatttattgatgattgatcccccggtgggggggaaacatcgggcataaatgggcatgaagtaatggagtattagttgtgaatgtcaatttctttgtcacctgtattggtgacgccctgaaatcaagaatggcacgagactccgtgctgctactggaaaaactcggctgtcgcgtaaatttcccggagaaacagggatgctgcggtcagcctgcgatcaatagcggttatatcaaagaagcgattccagggatgaaaaatctgatcgccgcactggaggataacgacgatcccattatttcaccggctggctcttgcacctatgccgtaaaaagttacccgacgtatctggcggatgaacctgaatgggcatcacgtgccgcaaaggttgccgcgcgtatgcaggatctcacctcttttattgttaataaattaggggtagtcgatgtaggtgccagtttgcaagggagagcggtgtatcacccatcttgtagcctggcccgtaagctgggagtgaaggacgagccacttacgctgctgaaaaatgtgcgtggactggagctgttgacctttgctgaacaggatacctgctgcggatttggcggcacgttctcggtcaaaatggccgaaatatccggcgagatggtgaaagaaaaggttgcgcacctgatggaagtccgccctgagtatttaattggtgctgacgtgagttgcctgctaaacatcagtgggcgattacaacgggaagggcagaaagtcaaagtgatgcatattgctgaagtgttgatgagccgctgaggatataaagatgtcgatcaaaaccagtaatacagattttaagacacgcatccgtcagcaaattgaagatccgatcatgcgcaaagcggtggcaaacgcgcagcagcgtattggggcaaatcggcaaaaaatggtcgatgaattggggcactgggaggagtggcgcgatcgggccgcccagatacgtgatcatgttctgagtaatctcgacgcttatctgtaccagctctcagaaaaagtgacgcaaaacggcggtcacgtctattttgcaagaaccaaagaagacgctacccgctacattttacaggttgcccaacgcaaaaatgcccggaaggtggtgaaatctaaatcgatggtgaccgaagagattggtgtcaatcatgtgttgcaggatgctggcattcaggtgattgaaaccgatctgggtgaatatattctccagctggatcaagatccgccatctcatgttgtggtcccggcaattcataaagatcgccatcagatccgtcgagtgctacacgaacgtctgggctatgaggggccggaaacgcctgaagcgatgaccttattcatccggcaaaaaatccgcgaagatttcctcagtgctgaaataggtattaccggctgtaatttcgcggtggcagagaccggttcggtatgcctggtgaccaatgaaggtaatgcgcgaatgtgtaccacgctgcctaaaacgcatattgcagtgatgggaatggagcgtattgcccccacgtttgccgaggtagatgtattgatcaccatgctggcgcgcagtgccgttggtgcacgtttgacgggatacaacacctggctgacaggaccgcgcgaagctgggcacgttgatggtcctgaagagtttcatctggttattgtcgataacgggcgttctgaggtgctggcctctgaatttcgggatgtgctgcgctgtattcgctgcggggcttgtatgaatacttgtccggcatatcgccatattggcggtcatggatatggctctatttatccagggccaattggtgcggtgatttctccgctacttggcggctataaagattttaaagatttaccctacgcctgctctttatgcacagcttgtgacaacgtgtgtccggtgcgtattccgctgtcaaaactgattttgcgtcatcgtcgggtgatggctgaaaaagggatcaccgcaaaagcagagcaacgggcgataaaaatgttcgcttatgccaatagtcatccaggattgtggaaagtcgggatgatggccggtgctcatgcggcaagctggtttatcaatggcggcaaaacaccactcaaatttggcgcgattagcgactggatggaagcacgcgatcttcctgaagctgacggagagagtttccgtagttggtttaagaaacatcaggcgcaggagaaaaagaatggataatcgaggcgaatttttgaataacgttgctcaggcactgggtcgcccgctgcgacttgaaccgcaagcagaagatgcgccgcttaacaactatgctaacgagcggcttacccaacttaaccaacagcagcgctgtgacgcgtttattcagtttgccagcgatgttatgttgacgcgctgtgagctgaccagcgaggcgaaggcggcagaagctgcaatacgtctgtgtaaagagctgggagatcagtcggtcgtgattagcggtgacacgaggctggaggaattggggattagcgaacgtttgcagcaggaatgcaatgccgttgtttgggatccggcgaaaggtgccgagaatatctcgcaggcagagcaggctaaagtgggtgttgtgtatgctgaatatggtttaaccgaatcgggaggcgtggttcttttttccgccgccgagcgcgggcgttcattgagcctgctcccggaatattctctttttatcctgcgtaaaagcactatcctgccgcgtgtagcgcaactcgcagaaaaattgcatcagaaagcgcaggccggtgaacgaatgccttcctgcattaacatcattagcggccccagttcaacggcggatattgagcttatcaaagtcgtcggagttcatggcccggtgaaagcggtgtatctgattattgaggattgttgagagagatatgaagtctggacataaacctgaagaaggcatacgaggttgaaaatagcgtttaggacaacctgacttaaccccgttccgtcatggttatgctgctcttctgtaaatatcctggtattaccaatgccaggatatttacagtgaaaaagacaggcatccattcctgaaaacgggttcccttcccggtcattgtcacttcagctttatacaggcactctctatcagaatgttgtttattactgcccagagttttgttggtattcatctaccatttttttgacaaggcaaaacattacagaaattacaatgcttagaaaaaatcccagagccaggcaaatggcagcagggtatttattttttatttctggtgagcttatagttacacagccatcaccgttcggatacaatgaccagttcctggtcaggtatatcatttttgtataaagctcactgttaattgctgaaggcgtttgtatctcatcgagaacttgcctgccattatgatattctgacgcataccatttgataatagaggcctgcacgcgagatatttcctcttcagcagttggtaaagctctcttatctcctgaccattccagccttatttctctgttcttgacatctgggctggtgtgaaaaaatgtagtaattcgctgaataacatcttcagtcattgtagtctgacaggcaaaattattattgctatcacagctaacaagtatacctggcgttgtctggtttatttttaggctgtaaatcacttttatattgtctttattgatatacagaaacaacagcaccatagccatacatatagccataataaaaaggataacacgaatctttttcttcagataaaataaaatctcaatcagatcgatatcctgtttgatttgttcacgcataatatatccagagaataaaatctgtcgcagataaggttgtattaatagtctgtatcaggaatgttcgggttaaatatcagcaaaaagcccgcatcatgaatactggatatgaagcatgagagttacctcagtgtttatataaggattcggtccccctctctggaacggtaactctcaatctgatcggttcctgcgttagttcacatcacgactcattttttcgctctcaccggcatcccatttgccacaaaatatcccgccgtgctcctcggcagcgcttcctgtccacgaatcatatccgctattttctcgccaatcataattgtcgtggcgttcaaattcccggtgataatctgcggcataatcgacgcatccaccacacgcaggccttctaacccgtgtacgcggccttcgccgtcaaccacggacatctcgtcgtaacccattttgcaggtaccgcacggatggaaggcggtttcggcgtggttacgcacgaactcatcgagctgttcatccgtctggcattcgacaccggggctgatttcgcggccacgatactgatccagcgcgggttgatgcatgatctcgcgggtgatgcgaattgcgtcgcggaactcctgccagtcctgctcgtgcgacatgtagttaaacagaatcgccggatgctggtgcgggtcgcgggatttaatccgcacatgcccacggcttggcgagcgcattgagccgacgtggcactggaaaccgtgctctttcactgcattcgagccgttatagttaatcgctactggcaggaaatggtactgaatattcggccacgcaaattcctcacggctgcgaataaatccacctgcttcaaagtggttgctggcaccaacgccagtgccgccaaacagccactccgcaccgattttcggctggttccaccactgcagggcagggtagagggaaaccggttctttgcactcatattgcagatacatctccagatgatcctgaagattttcgccgacgccgggtaattcatgcaccagcggaatatcaaactccgccagcagttcagcgttgccgacgccggagcgttgcaggatctgcggtgaggcaatcgcgcctgcacataacagcacttctttgttggccgttgcgcgggttgggatggtgctgtcgccttccagccattcgacgcccaccgcgcgtttgccgtcaaaaatgatgtgatcggtcatagcgtgagtacgaatggtcaggttaggacgcgatttggcctgatcgagatagccacgcgcggtgctggcgcgacggccctgcggcgtgacggtgcgatccatcggaccaaaaccttcctgctgataaccgttgagatcgtccgtgcgcgggtagcccgcctgcacgcccgcttcaatcatcgcttcaaacagcggattgacgccgggtttggaggtagtgacgctcaccgggccatcaccgccgtgatagtcgttttcacccatatcgcgagtctcggccttgcggtagtagggcaggcagtcgaggtagctccagttctccagaccgggttcttgcgcccagttatcgagatccagcgcattgccacggatgtagcacatgccgttgatcagcgacgatccacccagacctttaccgcgtccgcactccatgcggcggttattcataaacggttcaggttccgtttcataggcccagttgtagcgtttaccctgtagcgggaatgccagggcagcgggcatctgggtgcggaagtcaaagcgatagtccgggccgcccgcttcaagcagcagcacggaggtattcggatcttcagtcagacgggtagcgagaacgttgccggctgagccggcaccaataatgatgtagtcaaattgcaaataaacctcctggttagaatatggactggaatttagccatctcaacctggatggacttcacctgggtgtaactctggagcgtcatcacgccgttctcgcgaccaatgccggagtgtttgtagccgccaacgggcatctctgccggggattcgccccaggtgttgatccagcaaatacccgcttccagctgatgaatgacgcgatgcgcgcggttcaggtccgctgtcacgatgcccgccgccaggccgtagtcggtatcgttagcgcggcgaatgacttcgtcttccgactcgtaggtcagaatggacatcactggcccgaagatctcttcacgcacgatggtcatatcgtcgctgcaatcggtgaacactgtcggtgcaacccatgcgccgttatcgaagccatcgcctttcagtacatcgccgccgcacagtacgcgcgcgccttcctctttgcctttggcgatatagcgcagcacgttatcgcgatgcgggaagctgaccagcgggccgaagttagtttgcggatcgaaaacgtcgcccgcgcgaatgcgctcaacgcgcgccagaattttctgctcaaatgcggctttgcatttcgccggaacgaagacgcgggtgccattggtacacacctgaccggagctgaagaagtttgccatcatggcgatatcggcggcgagatcgagatccgcatcatcgaaaacgatcagcggtgatttaccgcccagttccatggtcacttctttcagggaagaggccgccgagttagccatcacttttttgccgctggcgacaccgccggtaaatgacactttggcaatgcccggatgctcggtcagatattgcccggtctccgcgcccacgcccggcaacacgttaaatacgccgtccggcaggcccgcttcgctgtaaatttcagccagctttaacgcggtaagcggggtaacttcgctcggtttgaaaatcattgcgttgcctgccgccagcgccggggcggatttccacagggcaatctggatcgggtagttccatgcgccaatccctgccactacgcccagcggttcgcggcgggtatacacaaaggacgtttcacgcaacgggatctggctgccttccagcgccgggatcagcccggcgtagtactccagcacgtccgcaccggtaacgatatcgacggttgaggtttccgaatatgcttttccggtgtcgagggtttccagttttgcgagttcgtcattgcgttcacgcagaatatcaacggcccgacgcagaatacgcgagcgctccatggcggtcatcgacgcccagattttttgcccctgctgggcgcttttcacggcgcgatcgacatcctcgcgcccggcggcctgcacggtcgccagcacgttaccgttggccgggttaatggtctcgaaggtgcgaccgctggtggcggaggtataaccaccatgtatataaagctgctgttctgccattcgggacatcacgtctcctcggttaatcggtgggtagatgctgagtgataaagtggcgggtcagggaattagcgcgggttttatccagcggtttgccgctcagagccgcgcgcagccataatccatcaatcagcgcggccaggccgtagcccgcttcctgtgcctgttcgcgcggcaattcgcgacgaaactcgctcaccagattcgacagcaagcggcggctgctgacctgctgtaaacgatagagcatcggctgatgcatactgctggcccagaacgccagccaggctttcatcgccgcactgctcacctgcgtttcatcgaagtttccgccaacaatcgcctgtaatcgctgctctgcactgccctgcggaagtgcatgtaatcgattcaaaaccgcgtcacgcagctgactggtgatatcgcgcatggttgcttccagcagaccatttttgtccctgaaatagtggctgatgatccccgtagaaacgcctgcacggcgggcgatctgcgcgatcgttgcatcgtgcatgcccacttcatttattgcttccagtgtggcgtcgatcagttgtctgcgccggatcgactgcatccccaatttgggcattttcgccactccattcatcagcggtgtttatctattaaagcggttattgattggacgttcaatataaaatgtgtcttaattgttacgaatttgattttaaatagtaacaataacagtggggatactggatgacagacctttcacacagcagggaaaaggacaaaatcaatccggtggtgttttacacctccgccggactgattttgttgttttccctgacaacgatcctgtttcgcgacttctcggccctgtggattggccgcacgctggactgggtttctaaaaccttcggttggtactatctgctggcggcaacgctctatattgtctttgtggtctgtatcgcttgttcgcgttttggttcggtgaagctcgggccagaacaatccaaaccggaattcagcctgctgagttgggcggcgatgctgtttgctgccgggatcggtatcgacctgatgttcttctccgtagccgaaccggtaacgcagtatatgcagccgccggaaggcgcgggacagacgattgaggccgcgcgtcaggcgatggtctggacgctgtttcactacggcttaaccggctggtcgatgtatgcgctgatgggcatggcgctcggatactttagctatcgttataatttgccgctcaccatccgctcggcgctgtacccgatcttcggtaaacggattaacgggccgataggtcactcagtggatattgcagcggtgatcggcactatcttcggtattgccactacgctcggtatcggtgtggtgcagcttaactatggcttgagcgtactgtttgatattcccgattcgatggcggcgaaagcggcactgatcgccttgtcggtgataatcgccacgatctctgtcacctccggtgtcgataagggcattcgcgtgttatcggagcttaatgtcgcgctggcgctgggattgatcctgttcgtattgtttatgggcgacacttcgttcctgcttaatgcactggtgctgaatgttggcgactatgtgaatcgctttatgggcatgacgctcaacagttttgccttcgaccgtccggttgagtggatgaataactggacgctcttcttctgggcatggtgggtggcatggtcgccgtttgtcggcttgttcctggcgcgtatctcgcgtgggcgtaccattcgccagttcgtgctgggcacgttgattattccgtttaccttcacgctgttatggctctcggtgttcggcaatagcgcgctgtatgaaatcatccacggcggcgcggcatttgccgaggaagcgatggtccatccggagcgcggcttctacagcctgctggcgcagtatccggcgtttacctttagcgcctccgtcgccaccattactggcctgctgttttatgtgacctcggcggactccggggcgctggtgctggggaatttcacctcgcagcttaaagatatcaacagcgacgcccccggctggctgcgcgtcttctggtcggtggcgattggcctgctgacgctcggcatgctgatgactaacgggatatccgcgctgcaaaacaccacggtgattatggggctgccgttcagctttgtgatcttcttcgtgatggcggggttgtataaatctctgaaggtagaagattaccgccgtgaaagtgccaaccgcgataccgcaccgcgaccgctggggcttcaggatcgcctgagctggaaaaaacgtctctcgcgcctgatgaattatccgggcacgcgttacactaaacagatgatggagacggtctgttacccggcaatggaagaagtggcgcaggagttgcggttgcgcggcgcgtacgtggagctaaaaagcctgccaccggaagagggacagcagttgggtcatctggatttgttggtgcatatgggcgaagagcaaaactttgtctatcagatttggccgcagcaatattcggtgccgggctttacctaccgcgcacgcagcggtaaatcgacctactaccggctggaaaccttcctgttagaaggcagccagggcaacgacctgatggactacagcaaagagcaggtgatcaccgatattcttgaccagtacgagcggcaccttaactttattcatctccatcgtgaagcgccgggccatagcgtgatgttcccggacgcgtgattgttattgcataaaaccgcgccatgtctgcatatggcgctgtttctcctacctcttgatacgttatatctatacggttaagcccttagtatctattgatgattaccagacaacagataataaaaaagaaaagaactattgcagcccaaaacctacatttgggctgttgcgaatgttcaataagtttagtcttatttaatgtaaatattgctgatcatttgaaatgacgcattattcatgagaaatgtgtatcgtaaatcaactgaaattaacgcaaccatttgttatttaaggtttaattatctgtgtgtgatattttattgaatgttttaaatattgtttttattggcattgctataatattggttatcatttgctgaatggattcagtcttaatgagtgggtttttaagggacaggcatagagtaatgatacgtatgcataaccaacatctttactcattatgtcattgaatgttgacgctatgtgtttatgagggagaggtattttcagttgatctggattgttaaattcatataatgcgcctttgctcatgaatggatgccagtatgtagtgggaaattataaatattgaaatagtccaactacttctttattaccaaaaatgagtatctgaattttaatattgcattcttgcgtgattatctcctgagtttgacttgtgattacctttttaaggtatttagcgtaactgtttttgagcgagcatcagaggtaaagataatcttcttgatagtgatgtgggatgttatacgtatggcatcgctgatgtttatggttaccccttatgtgtgctcaggaatcgacaggtaatcactcatactgaacagcgataaaagataaaggtgtgttcatgaattcatgtgattttcgtgtttttctgcaagagttcggtacaacggttcatttgtcattgcctggtagcgtatccgagaaagaacgactgctactcaagctgctgatgcagggaatgtctgtaacagaaatatcacagtacagaaatcgcagtgcaaagacaatttcacatcaaaagaaacagctctttgagaaactggggattcagagcgatattactttctggcgcgatattttctttcagtacaatccggagatcatatccgccacggggagtaatagtcacagatatattaatgataatcactatcaccatatcgtcacgcctgaagccatcagtctggcgttggaaaaccacgaattcaaaccgtggatccaaccggttttctgcgcgcagactggcgtactgacgggctgtgaggtgcttgtccgctgggaacatccacaaacgggaattatcccaccggatcagtttattcctctggcggagtcatccggtcttattgtcataatgacccgccaactgatgaaacagactgcggatattctgatgccggtaaaacatttgctgccggacaatttccatattggcatcaacgtctcggcgggttgttttttggcagcgggatttgaaaaagagtgtctgaacctggttaataaattaggtaacgataaaatcaagctggttctcgagctaacggaacgtaaccctattccggtaacgccagaagccagagcgatatttgacagccttcatcagcacaacattacctttgcgctggatgactttggtacgggttatgcgacctatcgttacttgcaggcgttcccggtcgattttattaagatcgataagtcatttgtgcaaatggcgagtgtcgacgaaatctccggtcatattgtggacaatattgtcgaactagcgcgtaagcctggtctgagtatcgtggcggaaggggtagaaacccaggagcaggcggatttaatgatcggtaaaggcgttcactttttgcagggctatttgtactctccgccagtaccgggtaataaatttatctctgaatgggtaatgaaagcaggtggttgatgtaaaccgctattcacagcgcatcgggaggttggcagcgattaattctcccgatgcagtaaatcctgatagatccccgttaatatgccatttggcgcaaattgttttttaatccactgcgtcacctgacccgtagcagaatgctgagtcgccagtaacatgcgcgaatcctggcgcggattatggatttgtcgggtaaccagcagggattgcgtcatcgcctcacggaccatgtaatccggcaaaaaaccaattccttcacctaaaatctggcactgacatttggtgttgaaatctggcaccagaattgactcctgcccgtgcagcaaccagcccacttttttattaatcgtatgcgcggtgtcctccaccataatattagggtagagacgcagttggctttcggcgatgggttccggcacaaaggctaacgggtgatccggggcgatagcaaaagcccagcgaatcgcgccaatttcagtgtaatcaataccgccgccgtccagtagtgtatcgggtgcgccgatggcgatattggcctgattattaataatcgcatcccagacgccgttatacacttcggtggtgacggtaatctggcaggtaggaaactgctttttcagcacctgtaacaagcgtgcggtgtgtttgggcgtataaagcagctgattaatacaaatgcgcacacgcgcttctatgccctgcgaaatagtatcgattctgcgtttgatggcataaaaatcattcagcaggtcggtagctttgcggaaaaaataacgcccggactccgttaactcaatgctgcgggtactgcgagtgaacagcaccacatccagccccgtctccatacgcttaatggtgtagctaatggcggaagtggttaaacccaactcttctgcggctttactgaagctgccaaaacgcgcagcggtagtaaatgccaacagattctcttcggtaaaaattgagttcattaaaccattctcgccattatctactatgaatttctccagctatgactgtagaggtatcggttaaagatagataatcatttttgaataacttttaatacccgtcgcgtttagtcgtcgcttcgcttaatttttgtccaccatattctgaaattacccccacgcagttacccgccagaaaacccagtaacgtcaccgtccagttcatcccgctggcaaaaaacagcgtcatgccgagaaagccaccgggaataaaggacagtaaccagaaacgcccttgccagaccactaccgccgagaagggtacggtagtaattacgctcgcccagaacgcggacagtccacttacagaggccagccaaccagcagtcagcgcggcgaaaaacgcccacaccatcccggaataattaaccgccagacttctgataaaccccgatttaccgccgcctgcggcataaaaactgcaaaaggcgacgaagccaatggttcctaataattcccatccttgagagagcccgacatgtgaagacactaactgccaaagccctgcacaaataccgacggtgacacccgttgccgtgagtccgttcatcttgttcccctctggttagacatggacgaaagctactcttacatgtgcagactatagagaaataaaacctgattgagtgaaagggtatcgggtcaaagaaacaaatattgcactaccgcacactgcgaaaagattgttgaatattattcaacaaaaaggcgagatacggcgaattaaatttaagcgggttcttttatcagattatcgttgctattctcaattcatcgaaaacagccacaaaaaccaggggaatgtgaatgagtataaaaaatctacctgccgactatttattggctgcacaacagggtgatatcgataaagtaaaaacctgccttgcgctgggtgtcgatattaatacctgcgatcgtcaggggaaaacggcaattacgctggcaagtttatatcagcaatatgcttgcgttcaggcattaattgatgccggagcggatattaataagcaagatcatacctgtttaaatccttttttaattagctgtctgaacgatgatttaacgctactacgaattattttaccggctaaacccgatcttaattgcgtaacccgttttggcggtgtcggcctgacgcctgcctgtgaaaaaggccatttaagtattgtaaaagagcttttggcgcatacggagattaacgttaaccagaccaaccatgtaggctggacgccgctactggaagcgattgtgcttaatgatggtggtattaaacagcaggcgattgtgcagttattgctggaacacggtgccagcccgcatctgaccgataaatatggcaaaacgccactggaactggcgcgggaacggggctttgaagagattgcgcagttactgattgccgcaggtgcataaaccgggaggcttgctatcaacacaccagaaagacggtgtgtgtgggcgctaactgcggatgcggattttctggcgcagcgggggcaaggacaggttgaacaggtctttgccagagcggtaaatatcgcactcccggctcgccagcagttgctgacgctgctttgtgaagagtacgacaatgcgccaaacagttgtcggttggcactcactcactttgatgatctgttccggcatggtgataaggttcagtttgacgatcaaggtattacggttggtcaacatcttcatatagagatgagtcgttgtcggcgttggctgtccccaaccttgcaaatgaccgctgtgaattttcaccttatcgcctggctacagtggcacgacattattcatcagcacctgggggaaaatgaaaccctgtttaattatcgcggcgataatccgttttatcaggcgttaaataaagaattacatattaaacgacgggcagttattcaggccgtaaacgataaacaaaatatcgcctcagcggtcgccagtatgatggggttagggattggccttacgccatcagccgacgattatttaacaggtctggcgcttattttatttattcccgggcatccggcggaaaaatacaaagaggaattttatctcggtctgcaacgcggcaaaaataataccacattattaagtgccataacgctggaagccgcattacaacaacgctgccgggaaaatattcatcgttttattcacaacattatttatgacatccctgggaacgcaactcaggcaatagaaaaaattaaacatattggctccagttccggctgcgacatgctgtatggcatggccgatggttgtgcgctgagccaaacctacggagggaattatgtcagttaaaatagtcattaaaccgaatacctattttgattctgtctcgctgatgtctatctccacgcgtgcaaataaactcgacggcgtcgagcaggcatttgtggcgatggcgaccgaaatgaataaaggcgtgctgaagaatttaggactgctgacgccggagctggagcaggcgaaaaacggcgacctgatgattgtcatcaatggtaaatcgggtgcggacaacgagcagttactggtggagattgaagaactgttcaacaccaaagcgcaaagcggctcgcacgaggcgcgttacgccactattggcagcgccaaaaagcatatcccggaaagtaacctggcggtgatttcggtcaacggtctgtttgccgctcgcgaagcgcgtcaggcgctgcaaaacgatctcaacgtgatgctgttttccgataacgtctcagttgaagatgaactggcgctcaagcaactggcccacgaaaaagggctgctgatgatggggccagactgtggcacggcgattatcaacggcgcggcgctctgttttggtaacgccgtgcgtcgcggcaacatcggtattgttggcgcatccggcaccggcagtcaggagttgagcgtccgcattcatgaatttggcggcggcgtttcgcaactgattggcaccggcgggcgcgacctgagcgagaaaatcggcggcctgatgatgctcgacgccatcgggatgctggaaaacgatccgcaaactgaaatcattgcgcttatctccaaaccgcctgcgcctgcggtggcccgcaaagtgctggaacgtgcgcgcgcctgccgcaagccggtggtcgtctgcttcctcgatcgtggcgaaacgccagtggatgagcaggggctacagtttgcccgcggcaccaaagaggcagcgctaaaagcggtgatgctctccggcgtgaaacaggaaaatctcgacctgcatacgcttaaccagccgttgattgcggatgtgcgtgcgcgtctgcaaccgcagcagaaatacattcgtggcctgttctgcggcggcacgctgtgcgacgaaaccatgttcgcggtgatggaaaaacatggcgatgtctacagcaacattcagcccgatccggaattccgcctgaaagatatcaaccgcagcatcaaacacaccttcctcgactttggcgatgacgacttcaccaatggcaagccgcacccgatgattgaccccaccaaccgcatcagtcgcttgatcgaagaggcgcgcgatccagaagtggcggtgatcgtgatggattttgtgctcggatttggatcgcatgaagatccggtcggctccaccatcgagacgatcaaagaagcgaaagcgatcgccgctgccgaaggacgcgagttgatcattctcgcctatgtgctgggtaccgatcttgatacgccatcgttagaacaacaaagccagatgctgcttgatgccggagtgattctggcgagcagcagcaccaataccggattgctggcgcgtgaatttatctgcaaaggggaggaagcctgatgagccagtcactgtttagccaaccattgaacgttattaacgtcggcatcgccatgtttagcgatgacctgaaaaagcagcatgtagaagtgactcaactcgactggacgccgccggggcagggcaatatgcaggtggtgcaggcgctggataacattgccgattcgccgctggcggacaaaatcgccgccgctaaccagcaggcgctggagcgtattatccagtcgcatccggtgctgattggttttgatcaggcgattaacgtggtgccgggcatgacggcgaaaaccattcttcacgccgggccgccgatcacctgggaaaaaatgtgcggcgcgatgaaaggcgcggtcaccggagcgctggtgttcgaaggactggcgaaagatctcgacgaggcggctgaactggcggcttccggggagatcaccttctcgccgtgtcacgagcacgactgcgtgggatcgatggcgggtgttacctcggcctcgatgtttatgcacatcgtaaaaaacaaaacctacggcaacatcgcttataccaacatgagcgagcagatggcgaagattttgcgtatgggcgctaacgaccagagcgtgattgaccgcctgaactggatgcgtgatgtgcagggaccaatactgcgcgacgcgatgaaaattatcggcgaaatcgatctgcgcttaatgctggcgcaggcgctgcatatgggcgatgagtgccataaccgcaataacgccgggacgacactgctgattcaggcgctgacgccggggattattcaggcgggttattccgtcgagcaacagcgcgaagtgtttgagtttgtcgccagcagcgactacttctccggcccgacgtggatggcgatgtgtaaagcggcgatggatgcggcgcatggcatcgaatacagcaccgtggtcaccaccatggcgcgtaacggcgtcgagttcggcctgcgggtcagcggcctgccggggcaatggtttaccggcccggcgcagcaggtgatcggcccgatgtttgccggttataagccggaagattcggggctggatatcggcgacagcgccatcaccgaaacctacggtattggcggatttgctatggcgaccgcgcccgctatcgtcgcgctggtgggcggcacggtggaagaagctattgatttctcccgtcagatgcgcgaaatcaccctcggtgaaaaccccaacgtcaccattccgctgctcggttttatgggcgtgccgtcggcaatcgacatcacccgcgtgggtagcagcggcattctgccggtgatcaacaccgccatcgcccataaagatgcgggcgtcggcatgattggcgcgggcattgtgcatccaccttttgcctgcttcgagaaagccattcttggctggtgcgaacgttacggcgtctgacctacatgttcatgccggatgcggcgtgaacgccttatccggcctacgaatggcgcaagaatctgtaggcctgataagcgtagcgcatcaggcatttgtcaccattgccggatgcggcgtgaacgccttatccggcctacgaatggcgcaagaatctgtaggcctgataagcgtagcgcatcaggcatttgccaccactgccggatgcggcgtggacgccttatccggcctacgagtggcgcgagaatctgtaggcctgataagcgtagcgcatcaggcatttgtcaccattgccggatgcggcgtgaacgccttatccggcctacgagtggcgcgagaattgtaggcctgataagcgtagcgcatcaggcagtctggcgttggtcataaccccatcaccctctgtagcggacataacaacatgaaagagcttgtggtcgttgccattggtggcaacagcattatcaaagataacgccagccagtcgattgagcatcaggcggaggcggtgaaagccgtcgccgatacggtgctggaaatgctggcttccgattacgacattgtgctgacccacggcaacgggccgcaggtcgggctggatttacgccgtgcggagattgcccacaagcgcgaagggctgcccttaacgccgctggcgaactgtgtggcagatacgcagggcggcatcggctatctgatccaacaggcgctgaataaccggctggcgcgtcacggcgagaagaaagccgtcaccgtggtgactcaggtggaagtggataaaaacgatccaggttttgcccatcccaccaagcccatcggcgcattctttagtgacagccagcgtgacgaattacaaaaggcaaaccctgactggtgttttgttgaagatgccgggcggggctatcgccgcgtggtcgcctcgccggaaccgaaacgtattgtcgaagcacctgccattaaagcgctgatccaacaaggttttgtcgtaattggcgcgggcggcggtggaattccggtagtgcgtactgacgcgggagattaccaaagcgtggacgcggttatcgacaaagatctctctaccgcgctgctggcccgtgaaattcacgccgacattcttgtgatcaccactggcgtcgaaaaagtgtgtattcactttggcaaaccgcagcagcaggcgctcgatcgggtggatattgccaccatgacccgctatatgcaggaagggcatttcccgcccggcagcatgttgccaaaaatcatcgccagcctgacatttttagaacaaggcggcaaagaagtgattatcaccacgccggaatgcctgcctgcggcgctgcgcggcgaaacgggcactcatattattaaaacgtaaggacgtaagatgaaagaaagcaatagccgccgtgaatttctgagccagagcggtaagatggtcaccgccgccgcgctgtttggtacctctgtgccgctcgcccatgcggcggtagctggcaccctaaactgcgaagcgaacaacaccatgaaaatcactgacccgcattactatctcgataacgtgctgctggaaaccggttttgactacgaaaatggcgtggcggtgcagacccgcacggcgcgccagaccgtggagattcaggacggcaaaattgtcgccctgcgcgagaacaagctgcatccggacgccacgctgccgcactatgacgctggcggtaagctgatgctgcccaccacccgcgacatgcatattcatctcgacaaaaccttttacggcgggccgtggcgctcgctcaatcgtccggcaggcaccaccatccaggacatgatcaaactcgagcagaaaatgctgccggaactgcaaccgtacactcaggagcgggcagaaaaactgattgatttattgcagtcgaaaggcaccaccattgcccgcagccactgcaatatcgaaccggtttccggcctgaaaaatctgcaaaatttgcaggcggtgctggcgcgacgtcaggcgggctttgagtgtgaaatcgtcgccttcccgcagcacggtttgctgctgtcgaaatctgaacctttaatgcgtgaagcgatgcaggcgggggcgcattacgtcggcggcctggacccgaccagtgttgatggcgcgatggaaaaatccctcgacaccatgttccagattgcgctggactacgacaaaggcgtcgatattcacctgcacgaaaccactccggcaggcgtggcagccatcaattatatggttgaaacggtagagaaaacgccacagctgaagggcaagctgaccatcagtcacgcctttgcgctggcaacgctcaacgagcaacaggtagatgaactggcgaaccggatggtggtgcaacaaatttctatcgcctcgacggtgccgattggcacgctgcatatgccgctcaaacagttgcacgacaaaggcgtaaaagtgatgactggcactgacagcgttatcgaccactggtcgccttatggtctgggcgacatgctggaaaaagccaatctgtacgcgcagctctatattcgtcctaacgaacagaacctctcccgctcgctgtttttagccactggcgatgtattgccgctgaatgaaaaaggcgagcgtgtatggccaaaagcgcaggatgacgccagctttgtgctggtggacgcctcctgttccgccgaggcggtggcgcgtatctcgccgagaaccgcaacgttccataaagggcaactggtgtgggggagtgtggcaggttgatgcgcatttgaaacgcctgcaacggtgaatagtaagagatttaagccccagggagtggggcaatctgaatatgagtgtgtcggcagaaatggacattatctttgaggaatatgcccttattgacgttgtgtagataactatttgtctacgtgaaaagatcatcagttttgccgattttagtcttttacagatagcaaatatcacacttacaggcgctcgccttatggggaacgttgctgctctgtttcattcaggctcgcggcatgttggggctggatcgggtggtttaaatattggctatattcaatggacgcgttttgccgcgatgacatatcaggcgttgccaaatacacatagctaatcaggagtaaacacaatgaagatcaaagctgttggtgcatattccgctaaacaaccacttgaaccgatggatatcacccggcgtgaaccgggaccgaatgatgtcaaaatcgaaatcgcttactgtggcgtttgccattccgatctccaccaggtccgttccgagtgggcggggacggtttacccctgcgtgccgggtcatgaaattgtggggcgtgtggtagccgttggtgatcaggtagaaaaatatgcgccgggcgatctggtcggtgtcggctgcattgtcgacagttgtaaacattgcgaagagtgtgaagacgggttggaaaactactgtgatcacatgaccggcacctataactcgccgacgccggacgaaccgggccatactctgggcggctactcacaacagatcgtcgttcatgagcgatatgttctgcgtattcgtcacccgcaagagcagctggcggcggtggctcctttgttgtgtgcagggatcaccacgtattcgccgctacgtcactggcaggccgggccgggtaaaaaagtgggcgtggtcggcatcggcggtctgggacatatggggattaagctggcccacgcgatgggggcacatgtggtggcatttaccacttctgaggcaaaacgcgaagcggcaaaagccctgggggccgatgaagttgttaactcacgcaatgccgatgagatggcggctcatctgaagagtttcgatttcattttgaatacagtagctgcgccacataatctcgacgattttaccaccttgctgaagcgtgatggcaccatgacgctggttggtgcgcctgcgacaccgcataaatcgccggaagttttcaacctgatcatgaaacgccgtgcgatagccggttctatgattggcggcattccagaaactcaggagatgctcgatttttgcgccgaacatggcatcgtggctgatatagagatgattcgggccgatcaaattaatgaagcctatgagcgaatgctgcgcggtgatgtgaaatatcgttttgttatcgataatcgcacactaacagactgaaaaaattaataaataccctgtggtttaacatattaacttcgctctccacttaactttttagttaaggagagcgaaataatatcaaagtagcagtaaaacctataacgtaaatttaaattgttaaattaacgccctccagtacacaatacttcacacgttagttatgagcgatttctgatagtgcctggtttaatcagagctttattatctgcgacgtttatttttatttaagagagatcgcgatgatatcattaaaagctccgcacaataatttgatgccatatacgcaacaaagcatacttaatacggttaaaaacaatcagttaccagaggatatcaaaagctccctggtttcctgtgtcgatatattcaaggttttgattaaacaatattatgattatccttatgattgtcgtgatgatttagtcgatgacgacaaactcattcatctcatggctgccgtacgagactgtgagtggtcagacgataacgcactcaccataaatgtgcagtttaatgatttccctggattttatgactggatggattaccctgatcacccggttaagtttgtttttcacatacttgaaaatcaaaaagggacagtttgggtatatgaccaggatgatgcgtttcttgatattaaagcaaacgtgcaggctggacgctttaccgggcttaagaaattagtgcagtttatcgattcagtgcgaacagattgcaaatgtattcttcttgaataccatatgcctttgctgagaattttccctaaagggaaagagtgtatgcatgtggaaaaatggcttcgcgaaatgtcgtctattccggagacagacgcgcccattaagcaggcgcttgcgcatggattattattacacttaaaaaatatctaccctgtttttcctgaatcactggtgatgttattgctctctgttctggacgtaaaaacatacagagatgatgcgcgattaaatgaatggatatctaatagagtgcaggaattaggtgacagatattatcctgtaaataagcacgttaaaatccgctacactctttagttcagaaagggttccacctgcaagttgttattccacctgagagtgaatcgcaatgcaggtaatcatttcatctgtatatctgtatgccaactggcattccatctcttttttcgccgatattttgttgtgatcggcgacacttcgcttaaaaaagcaccagtagtggtttcgcagccatgcggtgtataaaaaatgatctcatgcagatgttttgtgaatgtgttggttgacattcatatgaaaaaaatcataattccatcatgtttgtgtggggtcttttctgtatcttacgcatcgcactcaagcctgacagaaaatatgctgtaaggctcatatcaaaaaccgccattagctcatcaggaagagcagacgacaaccaggattgttgtatggtacggggttcgaggcctcgatggcggtccaacttttcaaaactcttctgaatcagatccccttattatcatccctgcaaagtggaacattgccattgtttggctattcaggatggggcagaccaatgaaaaaagcccacacaggggagagtgggctgaaatgggaagctaaagactcaagtaaacttatcggaaataaggaccacgcattacgggggctatcatcgccgatggccgtgattcggcaaatcaggttgattacgtagagagtaaattatctgctcaccgctgcgtcaccccttcgtaaatcaggcgtagcgcgaatacaccaataattgcaccaataacccgactggcaacgcgttgcatacgcccataagcacgacgcacagcgggcaaagaaaacgcctgactaagaaaaactcgccagataattgatgcgagcacaatccccgcccaggccattaaacgtgcccatgttggtgtttcggcatttaatgttactgagaaaatactgataaaaaataaaacggtttgcgggttagagagatcggtaattaatccgcggcgaaaaaagacataccagggggcgctaatcggttgttgtagtgtgctcatttgcggtgttgactggcggcgcatgctgcaccacgcaaaccataagagataagcgccgccgacgattctgataagcgaaaaaatctcctcacactgcgtaattagcgttgcaagaccaaacaaacccaacccggaataaaatgcatcgcccagcgccacgcccagcccggtcagcacccctgcgcgtcgaccggaagccaggctggtttgtactaccacaaagagattggctcccggattaaaaaaagtaatcacgaacagtcctacggtcaggtaaacggcatgcaaaggatccatagtgatttcatccataaataagtgaactaactgcatcatatttctaccaaaaataatcgggtgcgagagagatcacaaagtgtcttatttccggttactggcgtttatgccctgactgaactaattattaatcaacccaataatgtgggtgggtgatagtgtgataacaactctggagccgtaatatgaaaataatctctaaaatgttagtcggtgcgttagcgttagccgttaccaatgtctatgccgctgaattgatgaccaaagcggaatttgaaaaagttgaatcgcagtatgaaaaaataggtgatatttcaaccagcaatgaaatgtcgactgcagatgcaaaagaagatttgatcaaaaaagcggatgaaaaaggggctgatgtgttggtactgacctccggtcaaactgacaataagatccacggcacggcaaatatttataagaagaagtaattctgaatcctatgtaaacatctccgatgcgtaagtttatcggtgatcatctattgaaatttatgccggataaagcgttcgcgctgcattcggcagttcagcttttcagccgccgccagaacgtcgtccggctgatgcctaaataattcgccgctgctgttttatcgccattaaatttctccagtgcctgttgtggtgtcagtaagcgtggagcgggagttttcgccgactcgcgcgccagttccggcagtagcagttgcataaactgcggcgttaaatccggcgtcggttccacacttaaaaacagcgccagtcgttccatcatattgcgcagttcacgaatattgcctggccagtcgtagtgcagcagcacagtttcacttgcctgtaacccctggcgtaatgcagcagaaaatggggcggagagcgccgccagagacactttcaaaaagctttccgccagcggaagaatatccgccacccgctcgcgcagtggtggcaattgcagacgcaaaatactcagccgataaaacagatcacggcgaaaacgtccttgctgcatatcttcttccagattgcagtgagtggcgctaatgacccgtacatctaccggaacaggctgatgcccgccgacgcgggtgacctctttttcttccagcacccgcagcagccgggtctgcaaaggtagcggcatttcgccaatctcatccagaaacagcgtaccgccgtgggcaatttcgaacagcccggcgcgacctccgcgtcgcgagccggtaaacgccccttcctcatagccaaacagttctgcttccagcagcgattcggcaatcgccccgcagttgacggcaacaaacggatgcgactttttgccctgtcgcgcatcgtggcgggcaaaatattcccgatgaatcgcctgggccgccagctctttgcccgtccccgtttccccctcaatcaacaccgccgcactggagcgggcatacagcaaaatagtctgccgtacttgttccatctgtggtgattgaccgagcatatcgcccagcacgtaacgagtacgcagggcgttgcgggtggcatcgtgagtgttatggcgtaacgacatgcgcgtcatatccagcgcatcgctgaacgcctggcgcacggtggcggcggaatagataaaaattccggtcattccggcttcttctgccaaatcggtaatcagccctgcgccgaccaccgcttcggtgccgttagcttttagctcgttaatctgcccgcgtgcgtcttcctcggtaatgtagctacgttggtcgaggcgcaaattaaaggttttttgaaacgccaccagcgctggaatggtttcctgataggtgacaacgccgatagaagaggtgagttttccggcttttgccagtgcctgtaacacatcgtagccgctcggtttaatcaaaataactggcactgacaggcggcttttcaggtacgcgccgttagagccagccgcgatgatggcgtcacagcgttcgtttgccagtttcttgcggatgtaggtcactgctttttcaaagccaagctgaataggggtaatgttcgccaggtgatcaaactcgaggctgatatcgcgaaacagctcgaacaggcgcgttacagataccgtccagataaccggtttgtcgtcattaagccgtggtggatgtgccatagcgcaccgcaaagttaagaaaccgaatattgggtttagtcttgtttcataattgttgcaatgaaacgcggtgaaacattgcctgaaacgttaactgaaacgcatatttgcggattagttcatgactttatctctaacaaattgaaattaaacatttaattttattaaggcaattgtggcacaccccttgctttgtctttatcaacgcaaataacaagttgataacaaaggatgggctatgtctctacactctccaggtaaagcgtttcgcgctgcactgactaaagaaaatccattgcagattgttggcaccatcaacgctaatcatgcgctgttggcgcagcgtgccggatatcaggcaatttatctttctggcggtggcgtggcggcaggttcgctggggctgcccgatctcggtatttctacccttgatgatgtgctgaccgacattcgccgtatcaccgacgtttgttcgctgccgctgctggtggatgcggatatcggttttggttcttcggcctttaacgtggcgcgcaccgtgaaatcgatgattaaagccggtgcggcaggattgcatattgaagatcaggttggtgcgaaacgctgcggtcatcgtccgaataaagcgatcgtctcgaaagaagagatggtggatcggatccgcgcggcggtggatgcgaaaaccgatcctgattttgtgatcatggcgcgcaccgatgctctggcggtagaggggctggatgcggcgatcgagcgtgcgcaggcctatgttgaagcgggtgccgagatgttgttcccggaggcgattaccgaactcgccatgtaccgccagtttgccgatgcggtgcaggtgccgatcctcgccaacatcaccgaatttggtgccacgccgctgtttaccaccgacgaattacgcagcgcccatgtcgcaatggcgctgtacccactttcagcgttccgcgccatgaaccgcgccgctgaacatgtctacaacgtcctgcgccaggaaggcacgcagaaaagcgtcatcgacaccatgcagacccgcaacgagctgtacgaaagcatcaactactaccagtacgaagagaagctcgacaacctgtttgcccgtagccaggtgaaataaaaaacgcccgttgattgtattcgacagccgatgcctgatgcgtcgctgacgcgacttatcaggcctacgaggtgcactgaactgtaggtcggataagacggatggcgtcgcatccgacaaccgatgcctgatgcgccgctgacgtgacttatcaggcctacggggtgcactgaactgtaggtcggataagacgcatagcgtcgcatccgacaaccgatgcctgatgcgccgctgacgcgacttatcaggcctacggggtgcactgaactgtaggtcggataagacgcatagcgtcgcatccgacaaccgatgcctgatgcgccgctgacgcgacttatcaggcctacggggtgaactgaactgtaggtcggataagacgcatagcgtcgcatccgacaacaatctcgaccctacaaatgataacaatgacgaggacaacatgagcgacacaacgatcctgcaaaacagtacccatgtcattaaaccgaaaaaatctgtggcactttctggcgttccggcgggcaatacggcgctctgcaccgtgggtaaaagtggcaatgacctgcattaccgcggctacgatattcttgatctggcgaaacattgcgaatttgaagaagtggcgcatctgctgatccacggcaaactgccgacccgtgacgaactcgccgcttacaaaacgaaactgaaagccctgcgcggtttaccggctaacgtgcgtaccgtgctggaagccttaccggcggcgtcgcacccgatggatgttatgcgcaccggtgtttccgcgctcggctgcacgctgccagaaaaagaggggcataccgtctctggcgcgcgggatattgccgacaaactgctggcgtcgcttagctcgattctcctttattggtatcactacagccacaacggcgaacgcatccaaccggaaaccgatgacgactccatcggcggtcacttcctgcatctgctgcacggcgaaaagccatcgcaaagctgggaaaaggcgatgcatatctcgctggtgctgtacgccgaacacgagtttaacgcctccacctttaccagtcgggtgattgcgggcaccggctctgatatgtattccgcgattattggcgcgattggcgcactgcgcgggccaaaacacggcggggcgaatgaagtgtcgctggagatccagcaacgctacgaaacgccggacgaagccgaagcagatatccgcaagcgcgtggaaaacaaagaagtggtcattggttttggtcatccggtttacaccatcgctgacccgcgccaccaggtgattaaacgtgtggcgaagcagctctcgcaggaaggcggctcgctgaagatgtacaacatcgccgatcgcctggaaacggtgatgtgggagagcaaaaagatgttccccaatctcgactggttctctgctgtttcctacaacatgatgggcgttcccaccgagatgttcacaccactgtttgttatcgcccgcgtcaccggctgggcggcgcacattatcgaacaacgtcaggacaacaaaattatccgtccttccgccaattatgttggaccggaagaccgcccgtttgtcgcgctggataagcgccagtaaacctctacgaataacaataaggaaacgtacccaatgtcagctcaaatcaacaacatccgcccggaatttgatcgtgaaatcgttgatatcgtcgattacgtcatgaactacgaaatcagctctaaagtggcctacgacaccgcacattactgcctgctcgacacgctcggctgcggtctggaagctctcgaatacccggcctgtaaaaaactgctggggccaattgttcccggcaccgtcgtacccaacggcgtgcgcgtccccggaactcagttccagctcgaccccgtccaggcggcatttaacatcggcgcgatgatccgctggctcgatttcaacgatacctggctggcggcggagtggggccatccttccgacaacctcggcggcattctggcaacggcggactggctttcgcgcaacgcggtcgccagcggcaaagcgccgttgaccatgaaacaggtgctgaccgcaatgatcaaagcccatgaaattcagggctgcatcgcgctggaaaactcctttaaccgcgtcggcctcgaccacgttctgttagtgaaagtggcttccaccgccgtggtcgccgaaatgctcggcctgacccgcgaggaaattctcaacgccgtttcgctggcgtgggtggacggtcagtcgctgcgcacctatcgccatgcgccgaacaccggcacgcgtaaatcctgggcggcgggcgatgccacttcccgcgcggtacgtctggcactgatggcgaaaacgggcgaaatgggttacccgtcagccctgactgcgccggtgtggggcttctacgacgtctcctttaaaggtgaatcgttccgcttccagcgcccgtacggttcctacgttatggaaaatgtgctgttcaaaatctccttcccggcggagttccactcccagacggcagttgaagcagcgatgacgctctatgaacagatgcaggcagcaggcaaaacggcggcggatatcgaaaaagtgaccattcgcacccacgaagcctgtattcgcatcatcgacaaaaaagggccgctcaataacccggcagaccgcgatcactgcattcagtacatggtggcgatcccgctgctattcgggcgcttaacggcggcagattacgaggacaacgttgcgcaagataaacgcattgacgccctgcgcgagaagatcaattgctttgaagatccggcatttaccgctgactaccacgacccggaaaaacgcgccatcgccaatgccattacccttgagttcaccgacggcacacgatttgaagaagtggtggtggagtaccccattggtcatgctcgccgccgtcaggatggtattccgaaactggtcgataaattcaaaatcaatctcgcgcgccagttcccgactcgccaacagcagcgcattctggaggtttctctcgacagagctcgcctggaacagatgccggtcaatgagtatctcgacctgtacgtcatttaagtaaacggcggtaaggcgtaagttcaacaggagagcattatgtcttttagcgaattttatcagcgttcgattaacgaaccggagcagttctgggccgagcaggcccggcgtattgactggcagacgccctttacgcaaacgctcgatcacagcaatccgccgtttgcccgttggttttgtgaaggccgaaccaacttgtgccacaacgccatcgaccgctggctggagaaacagccagaggcgctggcgctgattgccgtctcttcggaaacagaagaagagcgcacctttacctttcgtcagctgcatgacgaagtgaacgcggtggcctcaatgttgcgttcattgggtgtgcagcgcggcgatcgggtgctggtgtatatgccgatgattgccgaagcgcatattactctgctggcctgcgcgcgcattggcgctattcactcggtggtgtttggtggatttgcctcgcacagcgtggcggcgcgaattgatgacgctaaaccggtgctgattgtctcggctgatgccggagcgcgcggtggcaaaatcattccctataaaaaattgctcgacgatgcgataagtcaggcgcagcaccagccacgccatgttttgctggtggatcgcgggctggcgaaaatggcgcgcgtcagcgggcgggatgtcgatttcgcgtcgttgcgccatcaacacatcggcgcgcgggtaccggtggcgtggctggaatccaacgaaacctcctgcattctctacacttccggcacgaccggcaaacctaaaggcgtgcagcgtgacgtcggcggatatgcggtggcgctggcgacctcgatggacaccatttttggcggcaaagcgggcagcgtgttcttttgcgcatcggatatcggctgggtggtggggcattcgtatatcgtttacgcgccgctgctggcggggatggcgactatcgtttacgaaggattgccgacctggccggactgcggcgtgtggtggacaatcgtcgagaaatatcaggttagccggatgttctcagcgccgaccgccattcgcgtgctgaaaaaattccctaccgctgaaattcgcaaacacgatctctcgtcgctggaagtgctctatctggctggagaaccgctggacgagccgaccgccagttgggtgagcaatacgctggatgtgccggtcatcgacaactactggcagaccgaatccggctggccgattatggcgattgctcgcggtctggacgacaggccgacgcgtctgggaagccccggtgtgccgatgtatggctataacgtgcagttgcttaatgaagtcaccggcgaaccgtgtggcgtcaacgagaaagggatgctggtggtggaagggccgctgccgccggggtgtattcagaccatctggggcgacgacggccgctttgtgaagacttactggtcgctgttttcccgcccggtgtacgccacctttgactggggcatccgtgacgctgacggttatcactttattctcgggcgcactgacgatgtaattaacgttgccgggcatcggctggggacgcgcgagattgaagagagtatctccagccatccgggcgttgccgaagtggcggtggttggggtgaaagatgcgctgaaagggcaggtggcggtggcgtttgtcattccgaaagagagcgacagtctggaagatcgtgatgtggcgcactcgcaagagaaggcgattatggcgctggtggacagccagattggcaactttggccgcccggcgcacgtctggtttgtctcgcaattgccaaaaacgcgatccggaaaaatgctgcgccgcacgatccaggcgatttgcgaaggacgcgatcctggagatctgacgaccattgatgatcctgcgtcgttggatcagatccgccaggcgatggaagagtaggttattgtcggatgcgtcgcgcggtgcatccggcactgtgtgccgatgcctgatgcgacgctgacgcgttttatcatgcctacggacctgaaccgtaggtcggataaggcgctcgcgtcgcatccgacaccatgctcagatgcctgatgcgacgctgacgcgtcttatcaggcctacccactgtttttacaccgataatttttcccccacctttttgcactcattcatataaaaaatatatttccccacgaaaacgattgctttttatcttcagatgaatagaatgcggcggattttttgggtttcaaacagcaaaaagggggaatttcgtgtcgcaagataacaactttagccaggggccagtcccgcagtcggcgcggaaaggggtattggcattgacgttcgtcatgctgggattaaccttcttttccgccagtatgtggaccggcggcactctcggaaccggtcttagctatcatgatttcttcctcgcagttctcatcggtaatcttctcctcggtatttacacttcatttctcggttacattggcgcaaaaaccggcctgaccactcatcttcttgctcgcttctcgtttggtgttaaaggctcatggctgccttcactgctactgggcggaactcaggttggctggtttggcgtcggtgtggcgatgtttgccattccggtgggtaaggcaaccgggctggatattaatttgctgattgccgtttccggtttactgatgaccgtcaccgtcttttttggcatttcggcgctgacggttctttcggtgattgcggttccggctatcgcctgcctgggcggttattccgtgtggctggctgttaacggcatgggcggcctggacgcattaaaagcggtcgttcccgcacaaccgttagatttcaatgtcgcgctggcgctggttgtggggtcatttatcagtgcgggtacgctcaccgctgactttgtccggtttggtcgcaatgccaaactggcggtgctggtggcgatggtggcctttttcctcggcaactcgttgatgtttattttcggtgcagcgggcgctgcggcactgggcatggcggatatctctgatgtgatgattgctcagggcctgctgctgcctgcgattgtggtgctggggctgaatatctggaccaccaacgataacgcactctatgcgtcgggtttaggtttcgccaacattaccgggatgtcgagcaaaaccctttcggtaatcaacggtattatcggtacggtctgcgcattatggctgtataacaattttgtcggctggttgaccttcctttcggcagctattcctccagtgggtggcgtgatcatcgccgactatctgatgaaccgtcgccgctatgagcactttgcgaccacgcgtatgatgagtgtcaattgggtggcgattctggcggtcgccttggggattgctgcaggccactggttaccgggaattgttccggtcaacgcggtattaggtggcgcgctgagctatctgatccttaacccgattttgaatcgtaaaacgacagcagcaatgacgcatgtggaggctaacagtgtcgaataacgctttacaaacaattattaacgcccggttaccaggcgaagaggggctgtggcagattcatctgcaggacggaaaaatcagcgccattgatgcgcaatccggcgtgatgcccataactgaaaacagcctggatgccgaacaaggtttagttataccgccgtttgtggagccacatattcacctggacaccacgcaaaccgccggacaaccgaactggaatcagtccggcacgctgtttgaaggcattgaacgctgggccgagcgcaaagcgttattaacccatgacgatgtgaaacaacgcgcatggcaaacgctgaaatggcagattgccaacggcattcagcatgtgcgtacccatgtcgatgtttcggatgcaacgctaactgcgctgaaagcaatgctggaagtgaagcaggaagtcgcgccgtggattgatctgcaaatcgtcgccttccctcaggaagggattttgtcgtatcccaacggtgaagcgttgctggaagaggcgttacgcttaggggcagatgtagtgggggcgattccgcattttgaatttacccgtgaatacggcgtggagtcgctgcataaaaccttcgccctggcgcaaaaatacgaccgtctcatcgacgttcactgtgatgagatcgatgacgagcagtcgcgctttgtcgaaaccgttgctgccctggcgcaccatgaaggcatgggcgcgcgagtcaccgccagccacaccacggcaatgcactcctataacggggcgtatacctcacgcctgttccgcttgctgaaaatgtccggtattaactttgtcgccaacccgctggtcaatattcatctgcaaggacgtttcgatacgtatccaaaacgtcgcggcatcacgcgcgttaaagagatgctggagtccggcattaacgtctgctttggtcacgatgatgtcttcgatccgtggtatccgctgggaacggcgaatatgctgcaagtgctgcatatggggctgcatgtttgccagttgatgggctacgggcagattaacgatggcctgaatttaatcacccaccacagcgcaaggacgttgaatttgcaggattacggcattgccgccggaaacagcgccaacctgattatcctgccggctgaaaatgggtttgatgcgctgcgccgtcaggttccggtacgttattcggtacgtggcggcaaggtgattgccagcacacaaccggcacaaaccaccgtatatctggagcagccagaagccatcgattacaaacgttgaacgactgggttacagcgagcttagtttatgccggatgcggcgtgaacgccttatccggcctacgtagagcactgaactcgtaggcctgataagcgtagcgcatcaggcaattccagccgctgatctgtgtcagcggctaccgtgattcattcccgccaacaaccgcgcattcctccaacgccatgtgcaaaaatgccttcgcagcggctgtctgccagctgtagtttatgccggatgcggcgtgaacgccttatccggcctacgtagagcactgaactcgtaggcctgataagcgtagcgcatcaggcaattccagccgcagacctgtgtcagcggctaccgtgattcatttccgccaacaaccgcgcatttatccaacgccatgtgcaaaaatgccttcgcggcggctgtctgccagctatttttccgccgcaacaaaaccgccgttctctccagtagtggcggggcaagagaaatagctttaagcccgtcatgttgtgtggcaatcgctgctggtaacaatgtggaaagggaagtgcggcgaatcagctccagaaccgcgctaattgagttcgcctcaatgaccacctgtggatgtagccccgctttctcgcagtagtggtcaatttgctctctggtggcaaattccgcgctgagcaggaccagtttttcatcatgcaagcgactcaacgccacctgttcatggacggccagcggatgatgttgcgccacgactaacgctaaactttctgtcagtaaaggaattgcctccagctccggcgaatgcacaggcgcgaaggcaatcccaacgtccaactcgtcgcggcaaagcatatcctcgattttctcctgcgacatttcctgtagctggagcgtgatgctgggatagcgcgcatagaaatccgccattaaggggccgataaagtagctcgtaaaggtgggggtgacggcgatacgcagcgatcctcgcgtcagatcggcaacatcatgaatcgcccgtttacccgcccccagttcctgtaacgcccggctggcgtactgtcgccagacttctcctgcatcagtgagacgaatcgttcgcccgctacggtcaaacagcggcacgcctaaactctcctctaactggcgaatctgctgggaaagcgcaggttgggagacgtgcaacgcactggcggcacgggtgaagctgccatgttcagccacggcaagaaaataattgatatgtcgagagagcattcgcaacctataagtaaatccaatggaactcatcataaatgagacttttaccttatgacaatcggcgagtagtctgcctctcattccagagacagacagaggttaacggtgaaagagattattgatggattccttaaattccagcgcgaggcatttccgaagcgggaagccttgtttaaacagctggcgacacagcaaagcccgcgcacactttttatctcctgctccgacagccgtctggtccctgagctggtgacgcaacgtgagcctggcgatctgttcgttattcgcaacgcgggcaatatcgtcccttcctacgggccggaacccggtggcgtttctgcttcggtggagtatgccgtcgctgcgcttcgggtatctgacattgtgatttgtggtcattccaactgtggcgcgatgaccgccattgccagctgtcagtgcatggaccatatgcctgccgtctcccactggctgcgttatgccgattcagcccgcgtcgttaatgaggcgcgcccgcattccgatttaccgtcaaaagctgcggcgatggtacgtgaaaacgtcattgctcagttggctaatttgcaaactcatccatcggtgcgcctggcgctcgaagaggggcggatcgccctgcacggctgggtctacgacattgaaagcggcagcatcgcagcttttgacggcgcaacccgccagtttgtgccactggccgctaatcctcgcgtttgtgccataccgctacgccaaccgaccgcagcgtaaccttatttttaaaccatcaggagttccaccatgattcagtcacaaattaaccgcaatattcgtcttgatcttgccgatgccattttgctcagcaaagctaaaaaagatctctcatttgccgagattgccgacggcaccggtctggcagaagcctttgtaaccgcggctttgctgggtcagcaggcgcttcctgccgacgccgcccgcctggtcggggcgaagctggatctcgacgaagactccattctactgttgcagatgattccactgcgtggctgcattgatgaccgtattccaactgacccaacgatgtatcgtttctatgaaatgttgcaggtgtacggtacaaccctgaaagcgttggttcatgagaaatttggcgatggcattattagcgcgattaacttcaaactcgacgttaagaaagtggcggacccggaaggtggcgaacgtgcggtcatcaccttagatggtaaatatctgccgaccaaaccgttctgacagccatgcgcaaccatcaaaagacgttcacgatgctgctggtactggtgctgattggtcttaatatgcgaccactgctcacctccgtcgggccactgctaccgcaattgcgccaggcgagcggaatgagctttagcgtggctgccctgttgaccgctctgccggtggttaccatgggcgggctggcgctggccggaagctggcttcatcagcatgtcagcgaacgtcgcagtgtcgccatcagtctgttgctgattgccgtcggtgcattgatgcgtgagctttacccgcaaagtgcgctgctgcttagcagcgcactgcttggtggggtggggatcggcatcattcaggcggtgatgccttcggtgattaaacggcggtttcagcagcgcacgccactggtgatggggctgtggtccgcggctctgatgggcggcggtgggcttggtgccgccataacgccctggttagttcaacatagcgaaacctggtatcaaacactcgcctggtgggcgctgcctgccgttgttgcgctctttgcctggtggtggcaaagcgcccgcgaggtcgcctcttcccacaagacaacaaccactccggttcgcgtggtattcactccccgcgcgtggacgctgggtgtttacttcggtctgattaacggcggttacgccagcctgattgcctggttacccgctttctatattgagattggtgccagcgcgcagtacagcggttccttactggcattgatgacgcttgggcaagccgcaggagctttgctgatgcctgctatggctcgccatcaggatcggcgcaaactgttaatgctggcgctggtgttacaactggtggggttctgcggctttatctggctgccgatgcaattgccggtattgtgggcgatggtgtgtgggttaggtctgggcggcgcgtttccgctctgtttgctgctggcgctcgatcactctgtgcaaccggctattgctggcaagctggtggcgtttatgcagggaatcggttttatcatcgccgggcttgccccgtggttttctggcgtgctgcgtagtatcagcggcaattacctgatggactgggcatttcatgcgctgtgcgtcgttgggctgatgatcataaccctgcgttttgcaccagtacgttttccgcagctgtgggtcaaagaggcatgatgcgacgcttgttcctgcgctttgttcatgccggatgcggctaatgtagatcgctgaacttgtaggcctgataagcgcagcgtatcaggcaatttttataatttaaactgacgattcaactttataatctttgaaataatagtgcttatcccggtcgtttatttcgcgaataacccgacaaggaacgccagccgccacgacgtttggtggaatgtcttttgtgacgatactacccgcgccaataacagaattatccccgatggtgacgcctggattaataaccacatgacttccgatccagacgttattgccaatcgttatcggaaaagagtacatctcgccgttttttctcaattcatggtgtacagggtgtcccgtaacggaaagagtaacgttgggtgcaatcagtacgttatcaccgattgttaccgtgtagtcatcgacaatggttaaattgaaatttgcataaaaattgcggcctatatggatgttggaaccgtaagagaaatagacaggcggttctacccaggcgttttcccctaccgtggcaaacatttctttaatcaggctttctcttttttcaacttctgatggatgcgagtgattaaactcatacattaacgttttcccacgaagtcttttttccggtaagccttcgcacatatcggtaaatagcttgcctgctcttattctttcggtcattggcatgttcaatgcgatcactccgttatgatatgttggtcggataaggcgctcgcgccgcatccgacattgattgcttaagcgacttcattcacctgacgacgcagcagggaaagcgggccggggccgctaagcgtgaacacggaaattaaggtgaagcccagcgccaccagacccagcaccagataagcgccctggaaaccgatgctttcatacatattgcccgccagtacagacataaaaatcatcgccagttgcttaaagaagcagaaacagaccagataaatcgtcgctgaaaaacgcacttcaaactggctggtaatatatttaaagcagcccaccagcaggaacggtacttcaaacatatgcagcgttttcagaataaccacttccagcgctgaggtggcgaacgatgagccaataatacgtacagacataatagtgccagccagcagcagggcgtttttcccaccgatgcgattaatgatcagtggcgcaaagaacataatcgaggcgttaagtaattcgcccattgtcgttacgtagccaaatacccgcgtaccctgttcaccggtagcaaagaacgaagtaaagaaattagcaaactgttggtcaaaaacatcgtaggtgcaggaaacgccaataacatacagtgacaaaaaccacagttttggctgtctgaacagttccagtgccagcttaaggctaaatgccgaatggttggcacctaccgcattggcaaccgtggcagaagagggcgcatccgttttggcgaaaaagagtaaaacggcgaggatgagtgcacagccagagcccagccagaaaacaaactgattattgatggtgaacatgatgccgacaatcgaggcacacagcgcccagccaacacagccaaacatccgcgcgcgaccaaattcgaaattactgcgacggctgactttctcaataaatgcctctactgctggcgcaccggcgttaaaacaaaagcctagataaataccaccaacaatcgatcctactaaaatgttgtattgtaacagtggcccgaagataaaaataaagaacggcgcaaacatcactaacatgccggtaataatccacagcaggtatttgcgcagcccgagtttgtcagaaagcagaccaaacagcggttggaataatagcgagaacagagaaatagcggcaaaaataatacccgtatcacttttgctgatatggttgatgtcatgtagccaaatcgggaaaaacgggaagtaggctcccatgataaaaaagtaaaagaaaaagaataaaccgaacatccaaaagtttgtgttttttaaatagtacataatggatttccttacgcgaaatacgggcagacatggcctgcccggttattattatttttgacaccagaccaactggtaatggtagcgaccggcgctcagctggaattccgccgatactgacgggctccaggagtcgtcgccaccaatccccatatggaaaccgtcgatattcagccatgtgccttcttccgcgtgcagcagatggcgatggctggtttccatcagttgctgttgactgtagcggctgatgttgaactggaagtcgccgcgccactggtgtgggccataattcaattcgcgcgtcccgcagcgcagaccgttttcgctcgggaagacgtacggggtatacatgtctgacaatggcagatcccagcggtcaaaacaggcggcagtaaggcggtcgggatagttttcttgcggccctaatccgagccagtttacccgctctgctacctgcgccagctggcagttcaggccaatccgcgccggatgcggtgtatcgctcgccacttcaacatcaacggtaatcgccatttgaccactaccatcaatccggtaggttttccggctgataaataaggttttcccctgatgctgccacgcgtgagcggtcgtaatcagcaccgcatcagcaagtgtatctgccgtgcactgcaacaacgctgcttcggcctggtaatggcccgccgccttccagcgttcgacccaggcgttagggtcaatgcgggtcgcttcacttacgccaatgtcgttatccagcggtgcacgggtgaactgatcgcgcagcggcgtcagcagttgttttttatcgccaatccacatctgtgaaagaaagcctgactggcggttaaattgccaacgcttattacccagctcgatgcaaaaatccatttcgctggtggtcagatgcgggatggcgtgggacgcggcggggagcgtcacactgaggttttccgccagacgccactgctgccaggcgctgatgtgcccggcttctgaccatgcggtcgcgttcggttgcactacgcgtactgtgagccagagttgcccggcgctctccggctgcggtagttcaggcagttcaatcaactgtttaccttgtggagcgacatccagaggcacttcaccgcttgccagcggcttaccatccagcgccaccatccagtgcaggagctccgatgataagctgtcaaacatgagaattccgatccccaattcctggcagtttatggcgggcgtcctgcccgccaccctccgggccgttgcttcgcaacgttcaaatccgctcccggcggatttgtcctactcaggagagcgttcaccgacaaacaacagataaaacgaaaggcccagtctttcgactgagcctttcgttttatttgatgcctggggaattgggaattaattcttgaagacgaaagggcctcgtgatacgcctatttttataggttaatgtcatgggaagatccagccgaccaggctttccacgcccgcgtgccgctccatgtcgttcgcgcggttctcggaaacgcgctgccgcgtttcgtgattgtcacgctcaagcccgtagtcccgttcgagcgtcgcgcagaggtcagcgagggcgcggtaggcccgatacggctcatggatggtgtttcgggtcgggtgaatcttgttgatggcgatatggatgtgcaggttgtcggtgtcgtgatgcacggcactgacgcgctgatgctcggcgaagccaagcccagcgcagatgcggtcctcaatcgcgcgttgcgctcactgcccgctttccagtcgggaaacctgtcgtgccagctgcattaatgaatcggccaacgcgcggggagaggcggtttgcgtattgggcaccagggtggtttttcttttcaccagtgagacgggcaacagctgattgcccttcaccgcctggccctgagagagttgcagcaagcggtccacgctggtttgccccagcaggcgaaaatcctgtttgatggtggttaacggcgggatataacatgagctgtcttcggtatcgtcgtatcccactaccgagatatccgcaccaacgcgcagcccggactcggtaatggcgcgcattgcgcccagcgccatctgatcgttggcaaccagcatcgcagtgggaacgatgccctcattcagcatttgcatggtttgttgaaaaccggacatggcactccagtcgccttcccgttccgctatcggctgaatttgattgcgagtgagatatttatgccagccagccagacgcagacgcgccgagacagaacttaatgggcccgctaacagcgcgatttgctggtgacccaatgcgaccagatgctccacgcccagtcgcgtaccgtcttcatgggagaaaataatactgttgatgggtgtctggtcagagacatcaagaaataacgccggaacattagtgcaggcagcttccacagcaatggcatcctggtcatccagcggatagttaatgatcagcccactgacgcgttgcgcgagaagattgtgcaccgccgctttacaggcttcgacgccgcttcgttctaccatcgacaccaccacgctggcacccagttgatcggcgcgagatttaatcgccgcgacaatttgcgacggcgcgtgcagggccagactggaggtggcaacgccaatcagcaacgactgtttgcccgccagttgttgtgccacgcggttgggaatgtaattcagctccgccatcgccgcttccactttttcccgcgttttcgcagaaacgtggctggcctggttcaccacgcgggaaacggtctgataagagacaccggcatactctgcgacatcgtataacgttactggtttcacattcaccaccctgaattgactctcttccgggcgctatcatgccataccgcgaaaggttttgcgccattcgatggtgtcaacgtaaatgcatgccgcttcgccttccggccaccagaatagcctgcgattcaaccccttcttcgatctgttttgctacccgttgtagcgccggaagatgcttttccgctgcctgttcaatggtcattgcgctcgccatatacaccagattcagacagccaatcacccgttgttcactgcgcagcggtacggcgatagaggcgatcttctcctcctgatcccagccgcggtagttctgtccgtaaccctctttgcgcgcgcgcgccagaatggcttccagctttaacggttcccgtgccagttgatagtcatcaccggggcgggaggctaacatttcgattaattccttgcggtcttgttccgggcaaaaggccagccaggtcaggcccgaggcggttttcagaagcggcaaacgtcgcccgaccattgcccggtgaaaggataagcggctgaaacggtgagtggtttcgcgtaccaccattgcatcaacatccagcgtggacacatctgtcggccataccacttcgcgcaacagatcgcccagcagtggggccgccagtgcagaaatccactgttcgtcacgaaatccttcgcttaattgccgcactttgatggtcagtcgaaaactatcatcggaggggctacggcggacatatccctcttcctgcagcgtctccagcagtcgccgcacagtggtgcgatgcaggccgctgagttccgccagcagcccgacgctggcaccgccatcaagtttatttaacatatttaataacattagaccgcgggttaagccgcgcacggttttgtattccgtctgctcattgttctgcatattaattgacatttctatagttaaaacaacgtggtgcacctggtgcacattcgggcatgttttgattgtagccgaaaacacccttcctatactgagcgcacaataaaaaatcatttacatgtttttaacaaaataagttgcgctgtactgtgcgcgcaacgacattttgtccgagtcgtgaggtactgaaatggcaatacaacaccctgacatccagcctgctgttaaccatagcgttcaggtggcgatcgctggtgccggcccggttgggctgatgatggcgaactatctcggccagatgggcattgacgtgctggtggtggagaaactcgataagttgatcgactacccgcgtgcgattggtattgatgacgaggcgctgcgcaccatgcagtcggtcggcctggtcgatgatgttctgccgcacactacgccgtggcacgcgatgcgttttctcaccccgaaaggccgctgttttgctgatattcagccaatgaccgatgaatttggctggccgcgccgtaacgcctttattcagccgcaggtcgatgcggtgatgctggaaggggtgtcgcgttttccgaatgtgcgctgcttgttttcccgcgagctggaggccttcagtcagcaagatgacgaagtgaccttgcacctgaaaacggcagaagggcagcgggaaatagtcaaagcccagtggctggtagcctgtgacggtggagcaagttttgtccgtcgcactctgaatgtgccgtttgaaggtaaaactgcgccaaatcagtggattgtggtagatatcgccaacgatccgttaagtacgccgcatatctatttgtgttgcgatccggtgcgcccgtatgtttctgccgcgctgcctcatgcggtacgtcgctttgaatttatggtgatgccgggagaaaccgaagagcagctgcgtgagccgcaaaatatgcgcaagctgttaagcaaagtgctgcctaatccggacaatgttgaattgattcgccagcgtgtctacacccacaacgcgcgactggcgcaacgtttccgtattgatcgcgtactgctggcgggcgatgccgcgcacatcatgccggtatggcaggggcagggctataacagtggtatgcgcgacgcctttaacctcgcatggaaactggcgttggttatccaggggaaagcccgcgatgcgctgctcgatacctatcaacaagaacgtcgcgatcacgccaaagcgatgattgacctgtccgtgacggcgggcaacgtgctggctccgccgaaacgctggcagggtacgttacgtgacggcgtttcctggctgttgaattatctgccgccagtaaaacgctacttcctcgaaatgcgcttcaagccgatgccgcaatattacggcggtgcgctgatgcgtgagggcgaagcgaagcactctccggtcggcaagatgtttattcagccgaaagtcacgctggaaaacggcgacgtgacgctgctcgataacgcgatcggcgcgaacttcgcggtaattggctggggatgcaatccactgtgggggatgagcgacgagcaaatccagcagtggcgcgcgttgggcacacgcttcattcaggtggtgccggaagtgcaaattcataccgcacaggataaccacgacggcgtactacgcgtgggcgatacgcaaggtcgcctgcgtagctggttcgcgcaacacaatgcttcgctggtggtgatgcgcccggatcgctttgttgccgccaccgccattccgcaaaccctgggcaagaccctgaataaactggcgtcggtgatgacgctgacccgccctgatgccgacgtttctgtcgaaaaggtagcctgatatgcacgcttatcttcactgtctttcccactcgccgctggtggggtatgtcgacccggcgcaagaggtgctcgatgaggtcaatggcgtgattgccagcgcccgcgagcgtattgcggcattctcccctgaactggtggtgctgtttgcgccagatcactacaacggctttttctatgacgtgatgccaccgttctgtttaggcgttggagcgacggcaattggtgatttcggcagtgcggcaggagagctgcccgtgcctgtggagctggcggaggcctgtgcgcatgccgtcatgaagagcgggatcgatcttgccgtttcttactgtatgcaggtggaccacgggttcgcccagccgctggagttcctgctcggtgggctggataaggtgccagttctgcctgtgttcatcaacggtgtcgccacgccgctgcccggtttccagcgtacccgcatgttgggtgaagccattggacgtttcaccagcactctcaataaacgcgtgctgttcctgggttccggtgggctttcccatcagccgccggtgcccgaactggcgaaagccgatgcccatatgcgcgaccgtctgttggggagcgggaaagatttacccgccagtgagcgcgaattgcgtcagcaacgggtgattagcgccgctgagaagtttgttgaggatcagagaacgctgcatccgctcaacccgatttgggataaccagttcatgactttgctggagcagggacgcatacaggaactggatgccgtcagtaacgaagagctttccgccattgccggaaagtcgacacatgaaatcaaaacctgggtcgccgcttttgccgctatttctgcgtttggcaactggcgtagcgaagggcgttattaccgcccaatcccggagtggattgccggatttggctcgttaagcgccagaacagagaactgaatatgcaggagaagatgatgagttatcagccacaaaccgaagccgccaccagccgttttctgaatgtagaagaagcgggtaaaacgctgcgcatccattttaatgactgcggacaaggcgacgaaaccgttgtcctgctgcatggttccggcccgggtgctactggctgggcgaacttcagccgcaatatcgatccgctggtagaggcgggctatcgggtgatcctgctggattgtccgggttggggcaagagcgattcggtcgttaatagtggttcgcgatcggatcttaatgcacgaatcctgaaaagcgtggtggatcaactggatatcgccaaaatccacctgctgggcaactcgatggggggccatagttctgtggcgttcacccttaaatggccggagcgcgtcggcaaactggtgctgatgggcggcggtacgggcggcatgagtttgtttacgccgatgccaaccgaaggtattaagcgactgaatcagctttatcgtcagccgactatcgaaaacctgaagctgatgattgtagattcaattggtcaacgcaacagttatgtgaaaacatggggttgcggaggttttttgaatgagacgaacatttacagcagaggaaaaagcctctgtttttgaactatggaagaacggaacaggcttcagtgaaatagcgaatatcctgggttcaaaacccggaacgatcttcactatgttaagggatactggcggcataaaaccccatgagcgtaagcgggctgtagctcacctgacactgtctgagcgcgaggagatacgagctggtttgtcagccaaaatgagcattcgtgcgatagctactgcgctgaatcgcagtccttcgacgatctcacgtgaagttcagcgtaatcggggcagacgctattacaaagctgttgatgctaataaccgagccaacagaatggcgaaaaggccaaaaccgtgcttactggatcaaaatttaccattgcgaaagcttgttctggaaaagctggagatgaaatggtctccagagcaaatatcaggatggttaaggcgaacaaaaccacgtcaaaaaacgctgcgaatatcacctgagacaatttataaaacgctgtactttcgtagccgtgaagcgctacaccacctgaatatacagcatctgcgacggtcgcatagccttcgccatggcaggcgtcatacccgcaaaggcgaaagaggtacgattaacatagtgaacggaacaccaattcacgaacgttcccgaaatatcgataacagacgctctctagggcattgggagggcgatttagtctcaggtacaaaaaactctcatatagccacacttgtagaccgaaaatcacgttatacgatcatccttagactcaggggcaaagattctgtctcagtaaatcaggctcttaccgacaaattcctgagtttaccgtcagaactcagaaaatcactgacatgggacagaggaatggaactggccagacatctagaatttactgtcagcaccggcgttaaagtttacttctgcgatcctcagagtccttggcagcggggaacaaatgagaacacaaatgggctaattcggcagtactttcctaaaaagacatgtcttgcccaatatactcaacatgaactagatctggttgctgctcagctaaacaacagaccgagaaagacactgaagttcaaaacaccgaaagagataattgaaaggggtgttgcattgacagattgaatctacaatggatatcttcgtttttgataccagcgatttgaccgacgccctgtttgaagcgcgcctgaataatatgctgtcgcgccgcgatcacctggaaaacttcgttaagagcctggaagctaatccgaaacagttcccggattttggcccacgtctggcggaaatcaaagcgcaaaccctgattgtctgggggcgcaacgaccgctttgtgccgatggatgcgggtctgcgtctgctgtccggcattgccggttctgaactgcatatcttccgcgactgtggtcactgggcgcagtgggaacatgccgacgctttcaatcaactggtgctgaatttcctcgcacgcccttaaggaatggtcatgacgaagcatactcttgagcaactggcggcggatttacgccgcgccgcagagcagggcgaagcgattgcaccgctgcgcgatctgattggtatcgataacgctgaagcggcttacgccattcagcacataaatgtgcaacatgacgttgcgcaggggcgtcgcgtggtagggcgtaaagtgggcctgacacatccgaaagtgcaacaacaactgggcgttgatcaaccggattttgggacgttatttgccgacatgtgttatggcgataacgaaatcattcctttttcccgtgttctgcaaccccgcattgaagcggagatcgcactggtgttgaaccgcgatttgcccgcaaccgatatcaccttcgacgaattgtataacgccattgaatgggtacttccggcgctggaagtggtggggagccgcattcgcgactggtcgattcagtttgtcgataccgtggcagataacgcctcctgtggggtgtatgtcatcggcggtccggcgcaacgtccggcggggttagacctgaaaaactgcgccatgaagatgacgcgtaataacgaagaggtttctagcgggcgcggcagcgaatgcctgggacatccgcttaatgcggccgtctggctggcacgcaaaatggccagtctgggtgaaccgctgcgcaccggagatatcattcttaccggggcattaggtccgatggtggcggtgaatgcgggcgatcgttttgaagcccatattgaaggcataggttcagttgctgcgacattttcaagcgcagccccaaaaggaagtctgtcatgagtaagcgtaaagtcgccattatcggttctggcaacattggtaccgatctgatgattaaaattttgcgtcacggtcagcatctggagatggcggtgatggttggcattgatcctcagtccgacggtctggcgcgcgccagacgtatgggcgtcgccaccacccatgaaggggtgatcggactgatgaacatgcctgaatttgctgatatcgacattgtatttgatgcgaccagcgccggtgctcatgtgaaaaacgatgccgctttacgcgaagcgaaaccggatattcgcttaattgacctgacgcctgctgccatcggcccttactgcgtgccggtggttaacctcgaggcgaacgtcgatcaactgaacgtcaacatggtcacctgcggcggccaggccaccattccaatggtggcggcagtttcacgcgtggcgcgtgttcattacgccgaaattatcgcttctatcgccagtaaatctgccggacctggcacgcgtgccaatatcgatgaatttacggaaaccacttcccgagccattgaagtggtgggcggcgcggcaaaagggaaggcgattattgtgcttaacccagcagagccaccgttgatgatgcgtgacacggtgtatgtattgagcgacgaagcttcacaagatgatatcgaagcctcaatcaatgaaatggctgaggcggtgcaggcttacgtaccgggttatcgcctgaaacagcgcgtgcagtttgaagttatcccgcaggataaaccggtcaatttaccgggcgtggggcaattctccggactgaaaacagcggtctggctggaagtcgaaggcgcagcgcattatctgcctgcctatgcgggcaacctcgacattatgacttccagtgcgctggcgacagcggaaaaaatggcccagtcactggcgcgcaaggcaggagaagcggcatgaacggtaaaaaactttatatctcggacgtcacattgcgtgacggtatgcacgccattcgtcatcagtattcgctggaaaacgttcgccagattgccaaagcactggacgatgcccgcgtggattcgattgaagtggcccacggcgacggtttgcaaggttccagctttaactatggtttcggcgcacatagcgaccttgaatggattgaagcggcggcggatgtggtgaagcacgccaaaatcgcgacgttgttgctgccaggaatcggcactattcacgatctgaaaaatgcctggcaggctggcgcgcgggtggttcgtgtggcaacgcactgtaccgaagctgatgtttccgcccagcatattcagtatgcccgcgagctcggaatggacaccgttggttttctgatgatgagccatatgaccacgccggagaatctcgccaagcaggcaaagctgatggaaggctacggtgcgacctgtatttatgtggtggattctggcggtgcgatgaacatgagcgatatccgtgaccgtttccgcgccctgaaagcagagctgaaaccagaaacgcaaactggcatgcacgctcaccataacctgagtcttggcgtggcgaactctatcgcggcggtggaagagggctgcgaccgaatcgacgccagcctcgcgggaatgggcgcgggcgcaggtaacgcaccgctggaagtgtttattgccgccgcggataaactgggctggcagcatgggaccgatctctatgcgttaatggatgccgccgacgacctggtgcgtccgttgcaggatcgaccggtacgagtcgatcgcgaaacgctggcgctgggatacgctggtgtttactcgagcttcctgcgtcactgtgaaacggcggcggcgcgttatggcttaagtgcggtggatattctcgttgagctgggcaaacgccggatggttggcggccaggaggatatgatcgttgacgtggcgctggatctgcgcaacaacaaataatgatgactgccgagaacgtgcattttgtatgcccatcccagcacgactgccggatgcggcgtgaacgccttatccggcctacggatggcgtgagaatttgtaggtctgataagacgcgttagcgtcgcatcaggcatctgcgcacgactgccggatgcggcgtgaacgccttatccggcctacggatggcgcgggaatttgtaggcctgataagacgcgttagcgtcgcatcaggcatctgcgcacgactgccggatgcggcgtgaacgccttatccggcctacgggtggcgcgagaatttgtaggcctgataagacgcgttagcgtcgcatcaggcatctgcgcacgactgccggatgcggcgtaaacgccttatccggcctacggatggcgcgggaatttgtaggcctgataagacgcgttagcgtcgcatcaggcatctgcacacgactgccggatgcgataaacgtcttgtccggcctacatttcgcccgtaggcagtcattaaatagttctgattacgcggctggcaatgtatcagtcgcgattcacctgcactcgcaacgaggttcatcttatgtcgactcgtaccccttcatcatcttcatcccgcctgatgctgaccatcgggctttgttttttggtcgctctgatggaagggctggatcttcaggcggctggcattgcggcgggtggcatcgcccaggctttcgcactcgataaaatgcaaatgggctggatatttagcgccggaatactcggtttgctacccggcgcgttggttggcggaatgctggcggaccgttatggtcgcaagcgcattttgattggctcagttgcgctgtttggtttgttctcactggcaacggcgattgcctgggatttcccctcactggtctttgcgcggctgatgaccggtgtcgggctgggggcggcgttgccgaatcttatcgccctgacgtctgaagccgcgggtccacgttttcgtgggacggcagtgagcctgatgtattgcggtgttcccattggcgcggcgctggcggcgacactgggtttcgcgggggcaaacttagcatggcaaacggtgttttgggtaggtggtgtggtgccgttgattctggtgccgctattaatgcgctggctgccggagtcggcggttttcgctggcgaaaaacagtctgcgccaccactgcgtgccttatttgcgccagaaacggcaaccgcgacgctgctgctgtggttgtgttatttcttcactctgctggtggtctacatgttgatcaactggctaccgctacttttggtggagcaaggattccagccatcgcaggcggcaggggtgatgtttgccctgcaaatgggggcggcaagcgggacgttaatgttgggcgcattgatggataagctgcgtccagtaaccatgtcgctactgatttatagcggcatgttagcttcgctgctggcgcttggaacggtgtcgtcatttaacggtatgttgctggcgggatttgtcgcggggttgtttgcgacaggtgggcaaagcgttttgtatgccctggcaccgttgttttacagttcgcagatccgcgcaacaggtgtgggaacagccgtggcggtagggcgtctgggggctatgagcggtccgttactggccgggaaaatgctggcattaggcactggcacggtcggcgtaatggccgcttctgcaccgggtattcttgttgctgggttggcggtgtttattttgatgagccggagatcacgaatacagccgtgcgccgatgcctgacgtgccttattaggcaggggcgaaagggacttcaccccaatacacctacggcgtttacaggtatactcgctaaaaattattcagcgggtttggaaacaaagatggcaaaacttaccttacaagagcagttgctcaaagcaggattagtcaccagcaaaaaagcggcgaaggtggagagaacggcgaaaaaatcgcgcgttcaggcgcgtgaagctcgggcggcggtagaagaaaataaaaaggcacagcttgagcgtgataaacagcttagcgaacagcaaaaacaagcggcgttggcgaaagaatataaagctcaggtgaagcagcttattgaaatgaaccgaatcaccattgccaatggcgatattggttttaacttcactgacggcaatctgattaagaagatttttgtcgataagctcacacaggcgcagttgattaatggtcgtctggcgattgcccgcttgttggtcgataacaatagcgaaggtgaatacgccattattcccgccagcgttgccgataaaattgctcagcgcgatgccagcagtatagtgttgcacagcgcgctcagcgccgaagagcaggatgaagacgacccgtatgccgacttcaaagtgcctgatgatttgatgtggtaaacatagataagtcgtgcgcagatgcctgatgcgacgctatgcgcgtcttatcaggcctacggtttatgggcgaagtgtagaccggataaggcgttcacgccgcatccggcagtcgtgcgccatgcctgatgcgacgctttgcgcgtcttatcaggcctacggcttacgggcgaagtgtaggccggataaggcgttcacgccgcatccggcagtcgtgctattatcaacgcatattcagtttattggcgtggtaggcaatatgctcgccaataaaactggagacaaaataatagctgtgatcataaccctcgtgataacggattaacgtcttgatattcatctcctggcagatcttttcaagatttggagtccgcagctgttctgcgtaaaaatcatcactcaacccctgatcaaccatgatttccgcaacgcgttgaccttgtgaaataagactcaccgggtcgtaatccaaccaggcatctttattttcagcaagatatgcagcaaaggcttgctgtccccacggcacttgcgatggggagacaatgggcgaaaacgccgagacgctgacatattcatctgggttacgtaacgccagcaccagcgcgcccagcccgcccatagaatgaccagagatagactttttggccgttgccggaaaatgatgcatcactaaatccggcagctcgttgcggatatagtcatacattttgtaatgttcattccacggcgcttgcgtcgcgttcaggtaaaacccggcaccttgcccgagatcgtaacggtcagcatctgcgacatgactgcctcgcggactggtgtccggcgcaacaacaataatgttgtgctcagccgcgtaacgctgcatccccgatttagtaatgaaattctgctcgttgcaggtcaggcctgaaagccagtacagcaccggcaatttttcattcgcggcttttggtgggagatagacgccgacattcatttcacatttcagtgattgggaataatgccgatacatattttgccagccgccaaagctgacatgtttttcaatgagttccatcagtcattatctcagggttaatcccccggacggctgcccggggagagtattaagaacccccgcctgaagtggacggggtaaacctgcgggaaatcagtaacgaattacggttcgaatggatttgccttcatgcatcaggtcgaaggcgtcattaatttcatccaggctcatggtatgcgtgacaaacggttccagatcgatatcacctttcatcgcatcttcaaccatgcccggtaactgggaacgacctttcacgccgccaaacgcggaacctttccatacgcgaccagtgaccaactggaatggacgggtggagatttcctgaccggcaaccgcgaccccgatgatcaccgactgaccccagccgcggtgcgcactttccagcgccgcacgcatcacgttgacgttaccgatgcattcaaaggtatggtcgataccccatttgttgatatccaacaggacatcttttatcggtttgtcgtagtcattcgggttaatgcagtcggtagcaccgaagcgacgcgccagatcgaatttcttcgggttggtatcgatagcgataatccgacccgctttcgcctgacgcgcgccctgaaccactgccagaccaatcgcgccaagaccaaacacggcaacagaatcacctggctggactttagctgtgttgtgtaccgcgccaataccggtggtcacgccacagcccagcaggcagacgtgttcatggtttgcttctggattaatttttgccagagacacttccgcgactacggtgtattcactgaatgtagagcaccccatgtagtgataaagcggctgcccgttgtaagaaaaacgggtggtgccgtctggcatcaggcctttaccctgggtttcgcgaaccgcaacacagaggttagttttgccagaacgacagaactcacactcgccgcactccgcggtgtaaagcgggatcacatggtcgccaggtttgacgctggttacgccttcaccgacttcaaccacaacgccggccccttcgtgaccgagaaccaccgggaatacaccttccgggtcatcgccggagagggtaaatgcgtcggtatggcaaacgccggtatgggtgactttaattagcacttcaccttttttcggtggtgcaacgtcaatttcaacgatttccagcggtttaccgggagcaaatgcaacggcagcacgtgatttcatctctcgctcttcctcaatatggtaatagattcagctatttaagataggcacgaaccagttcaatagtgtcgtcaacggattggctgacttcgcggctgtagcagtcatttcggtcaaacgtttcccggatatggctttcaagcacttctgccatcagcccattagccgcgccccgaacggcagcgatctgttggagtatggcacggcattcggcatcaccctccagcgaccgttccagagcatcaatctgcccccgaatacgacgaactcgagtaaggacctttttcttctcttccggagtactgggcatttcgcacctcatcatctgcatgcaatatactataggggggtattctatatgtcaatgcatacccccctatagtatataacactggagaataaaatttatccggtgaatgtggtcggaaaacaaagaggaaaggggggggggctaatcggcagggaaggccgccccggatagcgggcggcagaaggaatcagaatttccaggtcagacgggctgcaagttgcagaccgttaaaatcatcggttggggtgtcgtaccacactttacctgccgtcagcccgagattaagttgctcagtcagcggttgaatacgttgcagactgacgctcttcatgctgccgtagcgtgtttctggcgtccagtcataggtgtaagcacctgttccgcggcttagccatagttgcgtataaccagtgccgcgcgggtcattcagacgcacggaaatcatattgctataactaccacctgcatcgctggagtcataatgggtatagcggtagctggtgatcaccgggccagtatagagtgatacgccgccttgccaggcatcgacttcgacatcatcgtaatatttagtgtagcgataaccggtcgtgaaaagcgtttttggtaacagggccaggttaatatcctgacgaaaatcctggcgggcaaagaccggcgtattatccgcaaaggcaatacccgttcgggttgtcagccagttattccatttataccagaccgcaccctgaccgcgagtggcattgaaatgttcagtttcataatcacgacgcccctgggaaagattaaaaagcagcgttgcgttttcaactttcgccaccagttcagcatacgctaaattacggttgccatgatcgccagaataatcggtaaaatcgtagcccgcggtaatggaagttaacccggcataagcgggcaatgcgctaaaaatggccgccgctaataacgtccgttttatcattttaatctcctgtacggataagttcttgtcggagtgaataagttccggtaggtaaattacgttctacaatcacgcgcgggccaagttgcgtgttcggggaaataattcgcccaggcaaaataataacttgtacgccaaggcgtgaacgctgcccgatataacaacctaatttatcgcatccggtagcgataattccctctggagttcgaacagacacgggctgttcatccagacgatgattactggtacgtacttgtgcgcctaaatatgcctggtttgcaactaccgagtcggcaataaaacattgcggaccaatcgttgcttccgcttcaataaccgcatttttaatctcggtggcaaaaccaatttttacgccattgctgattattgtgccaggacgaataaacgcataattactagactggccccctgaatctccagacaaccaatatcacttaaataagtgatagtcttaatactagtttttagactagtcattggagaacagatgattgatgtcttagggccggagaaacgcagacggcgtaccacacaggaaaagatcgcaattgttcagcagagctttgaaccggggatgacggtctccctcgttgcccggcaacatggtgtagcagccagccagttatttctctggcgtaagcaataccaggaaggaagtcttactgctgtcgccgccggagaacaggttgttcctgcctctgaacttgctgccgccatgaagcagattaaagaactccagcgcctgctcggcaagaaaacgatggaaaatgaactcctcaaagaagccgttgaatatggacgggcaaaaaagtggatagcgcacgcgcccttattgcccggggatggggagtaagcttagtcagccgttgtctccgggtgtcgcgtgcgcagttgcacgtcattctcagacgaaccgatgactggatggatggccgccgcagtcgtcacactgatgatacggatgtgcttctccgtatacaccatgttatcggagagctgccaacgtatggttatcgtcgggtatgggcgctgcttcgcagacaggcagaacttgatggtatgcctgcgatcaatgccaaacgtgtttaccggatcatgcgccagaatgcgctgttgcttgagcgaaaacctgctgtaccgccatcgaaacgggcacatacaggcagagtggccgtgaaagaaagcaatcagcgatggtgctctgacgggttcgagttctgctgtgataacggagagagactgcgtgtcacgttcgcgctggactgctgtgatcgtgaggcactgcactgggcggtcactaccggcggcttcaacagtgaaacagtacaggacgtcatgctgggagcggtggaacgccgcttcggcaacgatcttccgtcgtctccagtggagtggctgacggataatggttcatgctaccgggctaatgaaacacgccagttcgcccggatgttgggacttgaaccgaagaacacggcggtgcggagtccggagagtaacggaatagcagagagcttcgtgaaaacgataaagcgtgactacatcagtatcatgcccaaaccagacgggttaacggcagcaaagaaccttgcagaggcgttcgagcattataacgaatggcatccgcatagtgcgctgggttatcgctcgccacgggaatatctgcggcagcgggcttgtaatgggttaagtgataacagatgtctggaaatataggggcaaatccaattacctatcaggcagtttgcgccaatcactaccggaccctgaataacggcaccatgacaaatacgggtattcgcgccgataacaacttcacctgcagtttcatcaataattacctggtctgcaatctgaatatttttctctttaacattaagcttcagatagtttttcagttcctgtgacagaaggttgggaataagcggttgacgcttccaccagtgcggaatagcgggtgggtttgtcgcgctgaggttcgcgtccagtaaaaaaggcaataagtccataaataatccagatggcataagctaataatacatacacaacggaaagcggcgctaaaggcaccaacaaccagcaacgatgaaaccaggcgctaaaagcaccaataacacaaactacgccgacccagataagcggaaacattgccaacaccactccatgcggcccggtggtgatgaattcattaaaccaggtagtgagataaatcccaacgccataaagcacaaccaacagcataggaaatatactgaagataccgaagcggctaaataaaagtcttttatgcaggcgcatacagaccgcgtatcccacaatccaacgccgccagcgacgccactcctcacgcgggctgttgcattcctgtgggtatacgatgcagcgattcgcctgccgaatacggtagccgtttgccaccaatgtccaggtgagatcaaggtcttcgactttagtacgatccgagaaaccgaacttacgcaatacatcagtacggaacatcccgcaggcaccgctgataataaacggtgcgccacccaggagctgctgtagcgtgcgcttcataacaatcatcggcaactttacggtcgcgcggatgtgcggtaacagacccgcgcctttcaacgcagtagagggaatgccgcctacggcatcggcaccgcgctcaatttctgccagcatatagcccattccgtcttgatcgggcggaacataggtgtcggcatcacttaaaaaaacctggtcgcaggtggcgtaattgaggccattcatcagcgcaccacctttaccggtatttttttgcgtgacggcaacaaagcggtcgccccatttgcgtttgacttccgccatgaccgcttcggtattgtccgtggagccgtcgttaacgcaaattacccggcaaaaataagggttacgcagtagattatccagtgactgcgccagacacgggccttcgttatacgcaggtataatggcgtcaatacagcctttcttttgactgggtttacgtcttagcgtacttaaaaaccatagcaacattgctatggacatacagataaatatccaggttttcatgcaatttgctcaaagaatcattttatgaattacaaagccttcacccagatcgctattgacctgttgtccgcgaaattgtgcaactgcacgcaggcgatcatgacgcatataatcgcgtcgttcctagcttttatgtttttttaatgcagcaagtttgactgtgaaatattcttctttaacggattcaaaaacctgaggcataaatgaaagccaggtacttggggtttcgtagccgagaatttgcggaatagttcggcaggcaaccattgaagcttgataaacagcaagatgatcctgatggcggtcggcatcatgcatggtatatacccgcatgatttcaacatcagaaggaatttgatttttaatgatgtcttccagggcggaaatcatatcattgagctgtaaatgagcgcgggtgtcagcaaaattaagatgaatagtttggtggcaccctaatatctttagggcgttgcgcgattcttcatggcgatcgattattccatctgtgccagagttgccggtagtcatcaccacggctgcgatataaattcctttttgcgcaagacgagcaagcgatgcgccacagcctaattctatatcgtcaggatgtgcgccaatagcaaggataccctttcttttatttgccgaagaaaggagggctgaatctaaaaccttatccacttaatgacactccattttatttattatactacaagcacaacgatgcactcagagacgtaatctctggcgcagccagatgttaatttataaatgttaaatgttgctaataactgaaaagcaagggctttcagacccgtgggttcgactgggtaatgtttctatgcaattcatatgttaagtgtttgtatgtttggtatgtatagttattttgttttatacattgtatttagatgtgatttagtttgtcaattaattgcatttaaaaaatatgttctgtgaacaagcattgtttatatacattatgtgaatgtaatatgcgagtgattgagaatgatacagtgatatatacaatgcgaatataatagttttattatatgtattgatattgatagaaataatgaagtaataaatctcgtaatgtggttgtttatgcatcactaaaatgaagtgtagtaattttcccaattgttagaacggagtaattgcatatttaatctttccttagccgtttttttgctaagaataaaatcatctgtgcgataacgactaattcttttaatgaatgtttttattcctgaatactgctcccataacaagacaggggagcagacaatcatggcaatttcatcgcgtaacacacttcttgccgcactggcattcatcgcttttcaggcacaggcggtgaacgtcaccgtggcgtatcaaacctcagccgaaccggcgaaagtggctcaggccgacaacacctttgctaaagaaagcggagcaaccgtggactggcgtaagtttgacagcggagccagcatcgtgcgggcgctggcttcaggcgacgtgcaaatcggcaacctcggttccagcccgttagcggttgcagccagccaacaggtgccgattgaagtcttcttgctggcgtcaaaactgggtaactccgaagcgctggtggtaaagaaaactatcagcaaaccggaagatctgattggcaaacgcatcgccgtaccgtttatctccaccacccactacagcctgctggcggcactgaaacactggggcattaaacccgggcaagtggagattgtgaacctgcagccgcccgcgattatcgctgcctggcagcggggagatattgatggtgcttatgtctgggcaccggcggttaacgccctggaaaaagacggcaaggtgttgaccgattctgaacaggtcgggcagtggggcgcgccaacgctggacgtctgggtggtgcgcaaagattttgccgagaaacatcctgaggtcgtgaaagcgttcgctaaaagcgccatcgatgctcagcaaccgtacattgctaacccagacgtgtggctgaaacagccggaaaacatcagcaaactggcgcgtttaagcggcgtgcctgaaggtgacgttccggggctggtgaaggggaatacctatctgacgccgcagcaacaaacggcagaactgaccggaccggtgaacaaagcgatcatcgacaccgcgcagtttttgaaagagcagggcaaggtcccggctgtagcgaatgattacagccagtacgttacctcgcgcttcgtgcaataaaaggaggcgcagatgctgcaaatctctcatctttacgccgattatggcggcaaaccggcactggaagatatcaacctgacgctggaaagcggcgagctactggtggtgctggggccgtccggctgcggtaaaaccaccctgctgaatctgattgccggttttgtgccttatcagcatggcagcattcaactggcgggtaagcgtattgagggaccgggagcagagcgtggcgtagtttttcagaatgaagggctactaccgtggcgcaatgtacaggacaacgtggcgttcggcctgcaattggcaggtatagagaaaatgcagcgactggaaatcgcgcaccagatgctgaaaaaagtggggctggaaggcgcagaaaaacgctacatctggcagctttccggtggtcaacgtcagcgggtggggattgctcgtgcgctggcggcgaatccccagctgttattactcgacgaaccgtttggtgcgctggacgccttcacccgcgaccagatgcaaaccctgctgctgaaactctggcaggagacgggcaagcaggtgctgttgattacccacgatatagaagaagcggtgtttatggcgactgaactggttctgctttcatccggccctggccgtgtgctggagcggctgccgctcaactttgctcgccgctttgttgcgggagagtcgagccgcagcatcaagtccgatccacaattcatcgccatgcgcgaatatgttttaagccgcgtatttgagcaacgggaggcgttctcatgagtgtgctcattaatgaaaaactgcattcgcggcggctgaaatggcgctggccgctctcgcgtcaggtgaccttaagcattggcacgttagcggttttactcaccgtatggtggacggtggcgacgctgcaactgattagcccgctatttttgccgccgccgcaacaggtactggaaaaactactcaccattgccggaccgcaaggctttatggacgccacgctgtggcagcatctggcagccagtctgacgcgcattatgctggcgctatttgcagcggtgttgttcggtattccggtcgggatcgcgatgggacttagccctacggtacgcggcattctggatccgataatcgagctttatcgtccggtgccgccgctggcttatttgccgctgatggtgatctggtttggtattggtgaaacctcgaagatcttactgatctatttagcgatttttgcaccggtggcgatgtcggcgctggcgggggtgaaaagcgtgcagcaggttcgcattcgtgccgcccagtcgctgggtgccagccgtgcgcaggtgctgtggtttgtcattttgcccggtgcgctgccggaaatcctcaccggattacgtattggtctgggggtgggctggtctacgctggtggcggcggagctgattgccgcgacgcgcggtttaggatttatggttcagtcagcgggtgaatttctcgcaactgacgtggtgctggcggggatcgcggtgattgcgattatcgcctttcttttagaactgggtctgcgcgcgttacagcgccgcctgacgccctggcatggagaagtacaatgagtgaacgtctgagcattaccccgctggggccgtatatcggcgcacaaatttcgggtgccgacctgacgcgcccgttaagcgataatcagtttgaacagctttaccatgcggtgctgcgccatcaggtggtgtttctacgcgatcaagctattacgccgcagcagcaacgcgcgctggcccagcgttttggcgaattgcatattcaccctgtttacccgcatgccgaaggggttgacgagatcatcgtgctggatacccataacgataatccgccagataacgacaactggcataccgatgtgacatttattgaaacgccacccgcaggggcgattctggcagctaaagagttaccttcgaccggcggtgatacgctctggaccagcggtattgcggcctatgaggcgctctctgttcccttccgccagctgctgagtgggctgcgtgcggagcatgatttccgtaaatcgttcccggaatacaaataccgcaaaaccgaggaggaacatcaacgctggcgcgaggcggtcgcgaaaaacccgccgttgctacatccggtggtgcgaacgcatccggtgagcggtaaacaggcgctgtttgtgaatgaaggctttactacgcgaattgttgatgtgagcgagaaagagagcgaagccttgttaagttttttgtttgcccatatcaccaaaccggagtttcaggtgcgctggcgctggcaaccaaatgatattgcgatttgggataaccgcgtgacccagcactatgccaatgccgattacctgccacagcgacggataatgcatcgggcgacgatccttggggataaaccgttttatcgggcggggtaatacgagagtggacggtcccctcgcccccttggggagagggttagggtgagggggcgttcaccgtactttcaacaggttaactccccctttctgagaggaaacaaaattaacgcagaatcttcttctcagccaaatccagcgcaaagtagctgaaaatcagatccgcacccgcacgcttaatcgaacctaagctttcgagcacgactttctcttcatctatagcacccgccagcgcggcgaacttaatcatcgcatactcaccgctcacctgatacgcgccaatcggcaattcagtacgttcacgcagctcacgcacgatgtcgaggtacgctccagcaggtttaaccatcaggcagtctgcgccctgggcttcatccagcagtgattcacgaatcgcctcacgacggttcattgggttcatctgatagcttttgcggtcgccttttaatgcgcttccggcagcttcacggaacgggccataaaaggaggaggcgaacttggtcgaatacgacataatcgccgtatctttaaatcccgcagcgtccagcgcctgacgaatcgcctgtacctggccgtccatcgcggcggaaggggcgatgaagtctgcacctgcagcagctgcaaccacggcttgcttgcctaaattttccagagtcgcgtcgttgtcgacgccatgctcgcacagcacaccgcagtgaccgtgagaagtgtattcacagaagcaggtgtctgacataacgatcatttctggcacggtctgcttgcagatgcgcgacatacgcgccaccagtccatcttcccgccaggcatcgctgccggtttcatcggtatggtgagagatgccaaaagtcatcacggaacgaataccggcgttggcgatgcgttcaatttcgcgtgccagatgtttctctggaatgcgcatcacgcctggcatggcttcaacggctttgtagtcgtcaatttcttcttcaacaaagatcggcaacaccaggtcgttaaggctaagtgttgtctcttcaaacatagcgcgcagcgcaggagatttgcgcaggcgacgagggcgttggattaagtctgtcatggtctgcctgatgtttgtggaatcgaggggcatagtatacctgaagcagggtagggatgttttacgaaagttgtcgcgatgttgacaagaagagaatggaagagaggccaggacatctttttaatagaaacagcaataattttatattcactgaaaatatttttaatctttatttatagctgttggttattattttttggagtttggttgcgctgctataaattgaataattaaaactttgttgcatattcataggatatttatctggtttgtgtttgtgatatttattatgcgtatgcttcaaaaacaaaattatctgcaacatgttgaaatactgtgcttttatgaatttgatgcgtgtttttctccataaattatatatgtccacattcggacttaggggaaagaataattgaaccattcgtctgtaacgcagcataatcgttagcgcgaaacataatatgttttctatgcattgataattgatggatcaacttattacgtccctgaggagggatgacaaatgcactcctggaaaaagaaacttgtagtatcacaattagcattggcttgcactctggctatcacctctcaggctaatgcagcaaactatgatacctggacttatatcgataatcccgttacagcacttgattgggatcatatggataaggcaggcactgtagatggcaactatgtaaactatagtggttttgtctattacaacaacaccaatggtgatttcgatcagtcctttaacggcgataccgttaacggcacgatctcaacctattatttgaaccatgattatgcagacagtactgctaatcagcttgatatcagtaattcagtgattcacggttcgattacttctatgctgcctggcggttattatgatcgttttgatgcagatggtaataatctgggtggatatgatttttacactgatgcggttgttgatacacactggcgtgatggtgatgttttcactttgaacattgctaacactactattgatgatgattatgaagctctttacttcactgattcttataaagatggtgatgtaaccaagcacacaaatgagacatttgatacaagtgaaggcgttgctgttaatcttgatgtagaaagtaacatcaatatttccaataactcccgcgttgcaggtattgcattatctcaaggtaatacttacaacgaaacctacactaccgaatctcatacttgggataacaatatctctgtaaaagattccacagtgacttcgggttcaaattatatcctggatagcaatacttatggcaaaactggtcactttggcaattctgatgaaccgagtgattatgctggcccgggtgatgttgcaatgtcctttactgcttcaggttccgactatgcgatgaagaacaatgtattcctcagcaattcaacgctgatgggtgatgttgcctttaccagcacctggaatagtaattttgatccgaatggtcatgattccaacggtgacggggtgaaagataccaacgggggttggactgatgatagcctcaacgttgatgaactaaatctcactctcgataacggaagcaagtgggttggtcaggcaatttataacgttgctgaaacgtcagcaatgtatgatgttgctacaaacagccttactcctgatgcaacatatgaaaacaatgactggaaacgtgttgttgatgacaaggtcttccagagcggtgtatttaacgtagcgttgaataacggttctgaatgggatactacaggtcgttccatcgttgataccttgacagttaataatggttctcaggttaatgtttcggaatctaaattaacttcagatactatcgatttaactaacggttcttcgctgaacattggtgaagatggctacgttgataccgatcatctgactattaactcctacagtactgttgcgttgaccgaatctactgggtggggggctgattgatcctacccacgtaatatggacacaggcctaagcgaggttcttgttttcaaattgttccggactgaggccgccacaccaactgtgccgccgccaccgattgtaatcacattcgatataattaaacaccgttgcccgcattatttcccggctgataaagtgttctccatggatacattccactttcagcgaatgaaagaagctttccacgcaggcattatcgtagcagcaaccttttgcgctcatacttccacgcagattatgccgcttcagttgcgcctgataatctgctgaacagtactggcctccacggtccgtgtgaacgataacgttccggggcctcttacgccgccacagcgccatctgcagggcatcgcaggccagttgcgccgtcatgcgtggcgacattgaccagccaataacggcacgtgaccacaggtcaatgaccactgccagatacagccagccttcatctgtacgtaagtacgtgatgtctcctgcccacttctggttcgggccactggcgtaaaaatcctgctccaacagattttctgacacaggcaggccgtgtgcgcggtagctgaccgggctgaacttccgggaggcctttgccctcagtccctgacggcgcaggcttgccgccacggtttttacgttaaaggggtaaccctgagcacgcagttcatccgtcaggcgtggggcaccgtaacgctgttttgaccgggtaaaagccgcgaggacaacgctgtcgcagtgttggcggaactgctgacgcgtgcttatccttgtccgccgctgacaccacgtataccagccgctgcgggccacccggagcacgcggcacattgctttgatgctgaactcagcctgatgtttttcaataaagacatacttcatttcaggcgcttcgcgaagtatgtcgcggccttttggaggatagccagctcttcatcccgttctgccagctggcgtttgagacgtgcaatctcggtagacatctccagttcacgttcagaagacgtctgctgattttgctgtttactgcgccagttgtagagttgtgattcatacaggctgagttcacgggctgcggcagtaacaccgatgcgttcagcaagcttcagggcttcactgcgaaattcaggcgaatgctgtttacggggttttttactggttgatactgtttttgtcatgtgagtcacctctgactgagagtttactcacttagccgcgtgtccactattgctgggtaagatcagattacaacctgtacgccaatactatcaccgtaactaacggcggtgtattggatgtgaacgttgatcagttcgatactgaagctttccgtactgacaaactggaactgaccagcggcaacatcgctgaccataacggtaacgtagtatctggtgtgttcgatatccatagcagcgattacgttctgaacgctgatctggtgaacgaccgtacctgggatacttccaagtctaactacggttacggtattgttgctatgaactctgatggtcacctgactatcaacggtaacggcgacgtagacaacggtactgaactggataacagctctgtagacaatgttgttgctgcaaccggtaactacaaagttcgtatcgacaacgcaactggcgctggcgctatcgctgattacaaagataaagaaattatctacgtaaacgacgtcaacagcaacgcgaccttctctgctgctaacaaagctgacctgggtgcatacacctatcaggctgaacagcgcggtaacaccgttgttctgcaacagatggagctgaccgactacgctaacatggcgctgagcatcccgtctgcgaacaccaatatctggaacctggaacaagacaccgttggtactcgtctgaccaactctcgtcatggcctggctgataacggcggcgcatgggtaagctacttcggtggtaacttcaacggcgacaacggcaccatcaactatgatcaggatgttaacggcatcatggtcggtgttgataccaaaattgacggtaacaacgctaagtggatcgtcggtgcggctgcaggcttcgctaaaggtgacatgaatgaccgttctggtcaggtggatcaagacagccagactgcctacatctactcttctgctcacttcgcgaacaacgtctttgttgatggtagcttgagctactctcacttcaacaacgacctgtctgcaaccatgagcaacggtacttacgttgacggtagcaccaactccgacgcttggggcttcggtttgaaagccggttacgacttcaaactgggtgatgctggttacgtgactccttacggcagcgtttctggtctgttccagtctggtgatgactaccagctgagcaacgacatgaaagttgacggtcagtcttacgacagcatgcgttatgaactgggtgtagatgcaggttataccttcacctacagcgaagatcaggctctgactccgtacttcaaactggcttacgtctacgacgactctaacaacgataacgatgtgaacggcgattccatcgataacggtactgaagggtctgcggtacgtgttggtctgggtactcagtttagcttcaccaagaacttcagcgcctataccgatgctaactacctcggtggtggtgacgtagatcaagactggtccgcgaacgtgggtgttaaatatacctggtaatattcttcactccgaagaaatactggtaatttaatctaaataatgcccgtcaaggatttgacgggcattactgcaaaggacgcgcaaatgttatctgtagttaaacctcttcaggaatttggtaagctcgataaatgtttgtccagatacggtacgcgcttcgagtttaataatgaaaagcaagttatattttccagtgatgtcaataacgaagatactttcgttattttagagggagttatctctctgcgtagagaagaaaacgtacttatcggtattacccaggctccttatattatggggctggctgatggtttaatgaaaaacgatataccatacaaattaatatcagaaggaaattgtacgggatatcatctaccagccaaacaaaccattacgcttattgaacaaaatcaactctggcgagacgctttttactggttagcctggcaaaatagaattctggaattacgcgacgtgcagctcattgggcataattcctacgaacaaatccgcgcaacattattatcaatgattgactggaatgaagaattgcgatcacgtattggtgtgatgaattatatccatcaacgtacacgcatatcgcgttctgtcgtcgcagaagttctcgctgctttgcgtaaaggcggctatatcgaaatgaataaaggcaaactggtcgctatcaaccgtttgccttcagagtattaatcaggacgcggggataaccaacggtttattcccgcttagctcggtcaccaggtcattgatgccatcgctcatatttttaaagcgcgtcaacggcgaacgagtgaccaccacaaacgcgccaatattcttctgcgggatcatcgccatataggtaatgaaaccgccaccaccgcctgtcttctgaataatccccggacgaccctctttcggggccatatatacccaacctaaaccaagcgcatccgctttgccggggacatccatgccaatcactttcgtaaactgcgcgcgctgataaatcaacgtctgcatgcgatctgcctggttactgcgctgataaaaatcagatgacaaatactgctgcatccagcgcatcatatcgccaggcgtggaatagacgccgccgctgccaattgccgccagcgtgttattgcacggactggcaccgcgctcagcaaccattaaacggcggcactgatccggtgagggggtgtaggtggtgtctttcatccccaatggacgggtaatctgctcttcaaacaactgggtataaggcttgccggacgcattcgccagtgcatctgccagcaggtcgaacgcaaggttagagtacgccgcctgactgcctggcgcggctttcagcttcgccgtagaaaggtatttccagcgttgctcgcgcgttggccagacaaacaccggacgatgtgccgcgccaccgggctgttcacggggcagggcgctggtatgggttgccagattgaccagcgtaatgggcgtcccattgtaggttggcacgcgtgcgcctggcggagcatatttacttagcggatcgtttaacttcacggtcccctggtcgagcaatttcaccagcatctcactggtcattagcttggtgagggaagcaatacgcacgaccgaatccagctgcgggcgaacgttattaccaggtcgcgtttcgccataactgcgaaagacgcgctggttaccgtcgataacaaccagagccatccccgtggcaccgctgccgtaaaaaatatgatcggcataacgatcgacaatatcagaggcaaactccggttcagtgatcggctgcgccgcatggacggaggtcaatgacgccgcacacagcacggcagaaaaaagcagactacgtttcaacggtggtgtccatagattgaatgaaggtaactgagcgtatttatactactcattgatagattgcaaagggcgaattagtgcaataatagtgttaaaaacgtaacggcgcgtaaacacgatctttttcctgctcaccaatgcctgcatttgtgatcctgcgcgtgttaatccgcttatgtaaacaatctttggtttgtgaaatccgtcgaaacaattcttatggtcaggctggcgaactaagcgccttgctatgggtcacaatgggcggtttcatttggctgacgctttgtagcggtcatgcggttaatacacagcagttgttaaaacgataagaagttagcaggagtgcatatgtttaagtcttttttcccaaagccgggaacgttttttctctcggccttcgtttgggcattgattgccgttatcttctggcaagccggtgggggtgactgggtggcgcgtatcaccggcgcttccgggcagatcccgattagcgccgcgcgtttctggtcgttggatttcctgattttttacgcttactacattgtttgcgtaggactttttgcattgttctggtttatctacagcccgcatcgttggcaatactggtcaatactcggtactgcactgatcatcttcgtcacctggtttttggtggaagtcggggtcgccgtcaacgcctggtatgcgccgttctatgatctgattcaaaccgcgctaagttcgccgcataaagtcaccatcgaacaattttaccgcgaagtgggcgtctttctggggattgcgctgatcgctgtggtgatcagtgtgctgaacaacttctttgtcagtcactacgtgttccgctggcgtacagcgatgaacgaatattacatggcgaactggcaacaactgcgtcatatcgaaggggccgcacagcgtgtgcaggaagacaccatgcgttttgcttcaacgctggagaatatgggcgtcagttttatcaacgccatcatgacgttgatcgccttcctgccggtgctggtaacgctctccgcgcatgtgccggagctgccgattatcgggcacattccgtatggtctggtgattgccgcaatcgtctggtcgctgatggggaccggattgctggcagtggtagggatcaaactgccggggctggagtttaaaaaccagcgtgtagaggctgcctaccgtaaagagctggtttatggtgaagacgatgccacgcgcgcgacgccgcctacggtacgcgagctgtttagcgccgtacggaaaaactatttccgcctctattttcactatatgtatttcaacatcgcccgcattctctatttgcaggtcgataacgttttcggtttgttcttgctgtttccgtcaattgttgccggtacgattacgctcggcctgatgacgcagattaccaacgtttttggtcaggttcgcggtgctttccagtacctgattaactcatggaccacactggttgagttgatgtctatctacaaacgtctgcgcagctttgaacatgagctggatggtgacaaaattcaggaagtaacccataccttgagctaaaaaggagaagtaatgtcgcgcgtcaatcctctatcttcgctgtcattgttggcggttctggttttagcggggtgtagtagtcaggctccgcaaccgttgaaaaagggcgaaaaagcgatagatgtagcgagcgtcgtgcggcagaagatgcctgcgagcgtgaaagaccgcgatgcctgggcgaaagatctcgccaccacctttgaaagtcaggggctggcaccgacgctggaaaacgtctgctcggtgctggcggtggcgcagcaggagtcaaattatcaggcagatccggccgttccgggcttaagcaagatcgcctggcaagagattgaccgtcgtgctgaacggatgcacattcctgcttttctggttcataccgcgctaaaaatcaaatcgccaaacggcaaaagttatagcgaacggttagattcggtgcgtacagaaaagcaattgagcgcgatttttgacgatctgatcaacatggtgccaatggggcagacgctgtttggttcgctcaatccggtgcgcaccggtgggccgatgcaggtcagcattgcttttgccgaacagcataccaaagggtatccgtggaaaatggacggtacagtccgtcaggaagtcttcagtcgccgcggcgggttgtggtttggtacttaccatttactgaattatcccgccagttatagcgcaccgatataccgttttgctgattttaacgctggctggtacgccagccgtaatgccgcgtttcagaacgcggtcagtaaggccagcggcgtgaagctggcactggacggtgatttaattcgttacgacagtaaagaacccgggaaaaccgaactggcaacgcgcaaactggctgcaaaactggggatgagcgacagcgaaattcgccgtcagttagagaaaggtgacagcttctcttttgaggagacggcgctgtacaagaaagtttatcaacttgccgaaacgaaaacgggtaaatcactcccccgcgaaatgttgcctggcattcaactggaaagcccgaaaatcacccgcaacctgactacggcctggtttgcgaagcgcgtagacgaacggcgggcgcgttgtatgaaacagtgatcaaacaggaatgtcaggccagataaggcgtttcaggccgcatctgacaatgtaaaacttactggcggcgatgtcgccagtgcagccatagcgccaccactgcaaaaatgaggcagcctactaaaaacgggatcagcccgaaaatggtgccgacacctaaaccaatttccacccgtgggcgacctgtttcctggacctgcattaaacgctcatagacgccgggcgcatgcactaacaggttcagcaattgcgccccagcccaaaagcaaaacagcacaaacaacgcataggcaatgttgccaggcgttgaagaggcattgcgatattttccgctaaacagcgattttgacagggtgaaatcagccataaaaacctccggaagtcatctgcttctcttctggtgtgataccagcggcttatggcaagtctgacaggtcatttagattgtcaatatcagaatcatggtaaattgatgttgggaatattcccgaagcgtgaatcttcgttgtgagtcacaaaatggcaaccttaagttaaatttattaacaattacgaaaatgttgtctacaccacagacggttgttgcagaatatgcaaggatgttgtttttcgttaacggagctgccatgaatctgcctgtaaaaatccgccgtgactggcactactatgcgttcgccattggccttatattcattcttaatggcgtggtggggttactgggatttgaagcaaaaggttggcagacctatgccgtcggtctggtgacgtgggtgattagtttctggctggcggggttgattattcgtcgtcgcgatgaagaaactgaaaacgcccaataagaatattatcgggcgttaaaatattacattgtggttttcaatgcgttatccgcagcgtgacgctccagcgccagttcaatcaaacgtgtgatcagatcggtgtaacccagaccgctggcttgccacagcttcggatacatactgatattagtgaagccaggcagggtgttgatctcgttgatcaccacttcgttctctggggttaaaaacacgtctacacgcgccatgcctgcgcatcccaacgtttgataagcctgaacggcaatcgcccggatcttatcgttgatttctggcgcaatggctgccggaactaccactttcgcgccatcttcgtcaatgtacttggtgtcgtaggcatagaaatcgctggtgagtacgatctctccacaggtgctggcttgcggattgtcgttgcccagaactgcgcattcgatctcacgacctttgatcccttgctcaacgatcactttatgatcgaactcgaacgccagatcgacggcaattgcgtactgttcttcactggttactttgctgacaccaacagaagagccctgattagccggttttacaaacagtggtaaccccagtttagactccacttcggcaaaactaatgttgtgacgattggcgcgcgtcagggtaataaatggcgcaatgttcagcccggcatcgcgtagcagacgtttggtgacatctttgtccatacaggctgctgaagccagaacatcagaacctacaaacggtaaattggcgacccgcagcattccctgcaaggaaccatcttcgcccagcgtaccgtggacaatcgggaaaatgacatccaccgtcggcaacggctgaccgttttgcgcgtcgataagctgatgctcatgtttacctggcacctgcgcaaggctggtcgccgaagggcgcaacgcaatatgggcaggatcgtctgcatttagcagataattgctggcatcgctgacgtgccattgcccttgtttatcaatgcccagcagcacaacgtcgaagcgacttttatcaatggcatcgacaatgttttttgccgattgcagagacacttcatgttccgctgatttaccaccaaaaacgattcctacccgcagtttttccatcttaaaaacctatcccgtctaacacaaagtgcatacattaccacgacaaaacgggggattcgcggccttctgaaagattgttgcaatcttctgctgacaaagcgtgcaacgtactggtgaagaaagtgcgttatctcaaagatgtgcgcaagatcacaaaaatgatgaacgggaagctaatttattcctggcttaaatggccatgcggtgagtttttttctcttaattataagttaacgaagagaatatatttcataacttttatttataataaaggttgataattaaaagcctatattttgtgtgggtaattatttaaataagagaaacgtttcgctggtaatcaaacaaaaaatatttgcgcaaagtatttcctttgtcataaaaataatacttccagacactatgaagttgtgaaacataatgttaacttctccatactttggataaggaaatacagacatgaaaaatctcattgctgagttgttatttaagcttgcccaaaaagaagaagagtcgaaagaactgtgtgcgcaggtagaagctttggagattatcgtcactgcaatgcttcgcaatatggcgcaaaatgaccaacagcggttgattgatcaggtagagggggcgctgtacgaggtaaagcccgatgccagcattcctgacgacgatacggagctgctgcgcgattacgtaaagaagttattgaagcatcctcgtcagtaaaaagttaatcttttcaacagctgtcataaagttgtcacggccgagacttatagtcgctttgtttttattttttaatgtatttgtacatggagaaaataaagtgaaacaaagcactattgcactggcactcttaccgttactgtttacccctgtgacaaaagcccggacaccagaaatgcctgttctggaaaaccgggctgctcagggcgatattactgcacccggcggtgctcgccgtttaacgggtgatcagactgccgctctgcgtgattctcttagcgataaacctgcaaaaaatattattttgctgattggcgatgggatgggggactcggaaattactgccgcacgtaattatgccgaaggtgcgggcggcttttttaaaggtatagatgccttaccgcttaccgggcaatacactcactatgcgctgaataaaaaaaccggcaaaccggactacgtcaccgactcggctgcatcagcaaccgcctggtcaaccggtgtcaaaacctataacggcgcgctgggcgtcgatattcacgaaaaagatcacccaacgattctggaaatggcaaaagccgcaggtctggcgaccggtaacgtttctaccgcagagttgcaggatgccacgcccgctgcgctggtggcacatgtgacctcgcgcaaatgctacggtccgagcgcgaccagtgaaaaatgtccgggtaacgctctggaaaaaggcggaaaaggatcgattaccgaacagctgcttaacgctcgtgccgacgttacgcttggcggcggcgcaaaaacctttgctgaaacggcaaccgctggtgaatggcagggaaaaacgctgcgtgaacaggcacaggcgcgtggttatcagttggtgagcgatgctgcctcactgaattcggtgacggaagcgaatcagcaaaaacccctgcttggcctgtttgctgacggcaatatgccagtgcgctggctaggaccgaaagcaacgtaccatggcaatatcgataagcccgcagtcacctgtacgccaaatccgcaacgtaatgacagtgtaccaaccctggcgcagatgaccgacaaagccattgaattgttgagtaaaaatgagaaaggctttttcctgcaagttgaaggtgcgtcaatcgataaacaggatcatgctgcgaatccttgtgggcaaattggcgagacggtcgatctcgatgaagccgtacaacgggcgctggaattcgctaaaaaggagggtaacacgctggtcatagtcaccgctgatcacgcccacgccagccagattgttgcgccggataccaaagctccgggcctcacccaggcgctaaataccaaagatggcgcagtgatggtgatgagttacgggaactccgaagaggattcacaagaacataccggcagtcagttgcgtattgcggcgtatggcccgcatgccgccaatgttgttggactgaccgaccagaccgatctcttctacaccatgaaagccgctctggggctgaaataaaaccgcgcccggcagtgaattttcgctgccgggtggtttttttgctgttagcaaccagacttaatggcagatcacgggcgcatacgctcatggttaaaacatgaagagggatggtgctatgaaaataacattactggttaccttgcttttcggtctggtttttttaaccaccgtcggcgctgccgagagaactttaaccccacaacaacagcgtatgacctcctgtaatcagcaggcgacggcgcaggcgttgaaaggggatgctcgtaagacctacatgagtgattgcctgaagaacagcaagtctgcgcctggcgaaaaaagtttgacgccacagcagcaaaagatgcgcgaatgcaataatcaagcaacacaacaatctctgaaaggtgatgatcgtaataagtttatgagtgcctgcctcaagaaagccgcctgatacctgatagtgctaacgggtgagctacgaaaatggctcacccgaaatatcatacttctgcctttagctccgtctctataatttgggaaaattgtttctgaatgttcccaaaaataatgaatgatgaaaactttttcaaaaaagcggcggcgcacggggaggaacctcctttaactcctcaaaacgaacatcagcggtccgggctgcgcttcgcccgtcgcgtcagactaccccgtgcggttggcctggctggcatgttcttaccgattgcttcaacgctggtttcacacccgccgccgggctggtggtggctggtgttggtcggctgggcgttcgtctggccgcatttagcctggcagatagcgagcagggccgtcgatccgcttagccgggaaatttacaacttaaaaaccgatgcagtattagcgggaatgtgggtaggcgtaatgggcgtaaacgtgctgccttccaccgcgatgttgatgattatgtgtctgaatttgatgggggcaggcggcccccgtctgtttgtcgcgggtctggtgttgatggtggtttcctgccttgtcaccctcgagctgacgggcattaccgtgtcgttcaatagtgcgccgctggaatggtggctctcccttcccattattgtcatttatcctctgctgtttggctgggtcagctaccagacggcaaccaaactggcggaacataaacgcaggttgcaggtcatgagtacccgcgacggcatgacgggcgtgtataaccgacgtcattgggaaactatgttacgcaatgaatttgataactgtcggcggcataatcgcgatgcaacgttactgattatcgatatcgaccatttcaagagcatcaacgatacctggggccatgatgtgggcgatgaagcgattgtggcgcttacccgacagttacaaattaccctgcgcggtagcgatgtgattggtcggtttggcggcgatgagtttgcagtaatcatgtccggtacgccagctgagagcgccattaccgccatgttacgggtgcatgaagggctaaatacattacgtttgccgaatacgccacaggtaactttacggattagtgtgggggttgcgccgctgaacccacaaatgagtcactatcgtgagtggttgaaatcggcagatttggcgctttacaaagcaaagaaagccggacgtaaccgcaccgaagtggcggcctgacgtccggcgaaagtcatcaggatttgctgagtttttctgatttttccatacacttcgtcatcgcttcgatcactgcagcacggaagcctttctcttccagtacgcgtaccgcttcaatggtggtgcctcccggtgagcagaccatatctttcagtgcccccggatgttctcccgtttccagcaccatttttgcggaacccattaccgcctgagcggcaaatttatacgcctgggcgcgtggcatcccgcccagcacggcggcgtcggccatcgcttcgataaacataaatacgtaggctggcgaagaaccgctcacaccgaccaccgggtggatcatcggctcagcaattacttccgcttcgccaaagcagcggaaaatattcagcacatcagcggtatcttctggggttaccagcgcgtttggcgttacggaggtcatcccggcattaaccagtgcgggagtgttcggcatggcgcggataattttccggtcatggcccagcgcgcgggcaagctggtcgagcgtgacacctgcagcaatagaaacgaccagagagtctttattcaggctggaggtgatttcgctaagcactttaatcatgatgccaggtttaacggcagcaaaaatgatgtcggcgatttgcgccacttcttgcgccgattctgcggcgttgatgccgaactggtcatgcagggcggcgactttatccggggagggggtgtatacccagatttgccctggaagcacctgaccgctggcaatcagaccgccgagaatggcttttcccatattgccgcagccaataaaaccgattttcttttccattgcctcactcctgccgtgaaattcattgttttgataatcgctggcagaagcataaacagaactatgccggaaggcaaaagcgcgacacaatagaggattacccaacaaaggatgactttatgacaatttgggtggatgccgacgcgtgtcccaatgtaattaaagagattttgtatcgcgcggcggaacgtatgcagatgccgctggtactggtagcaaaccagagtttacgcgtgccgccatcgcgatttattcgtacgctgcgcgtcgcggcaggtttcgacgttgccgataacgaaattgtccggcagtgtgaagcgggcgatttggtgatcaccgcagatatacctttggctgctgaagccatcgagaaaggcgctgcggcgcttaatccgcgcggcgaacgttacacgccagcgaccattcgtgagcgcctgacgatgcgcgattttatggataccttacgtgccagtgggatccagaccggcggaccagatagcctttcacaacgtgaccgccaggcctttgccgcggagctggagaagtggtggctggaagtgcaacgtagtcgtggctaaatgtaatttattatttacacttcattcttgaatatttattggtatagtaaggggtgtattgagattttcactttaagtggaattttttctttacaatcgaaattgtactagtttgatggtatgatcgctattctcatgacaccggctttcgccgcattgcgacctattggggaaaacccacgatgacacaacctctttttctgatcgggcctcggggctgtggtaaaacaacggtcggaatggcccttgccgattcgcttaaccgtcggtttgtcgataccgatcagtggttgcaatcacagctcaatatgacggtcgcggagatcgtcgaaagggaagagtgggcgggatttcgcgccagagaaacggcggcgctggaagcggtaactgcgccatccaccgttatcgctacaggcggcggcattattctgacggaatttaatcgtcacttcatgcaaaataacgggatcgtggtttatttgtgtgcgccagtatcagtcctggttaaccgactgcaagctgcaccggaagaagatttacggccaaccttaacgggaaaaccgctgagcgaagaagttcaggaagtgctggaagaacgcgatgcgctatatcgcgaagttgcgcatattatcatcgacgcaacaaacgaacccagccaggtgatttctgaaattcgcagcgccctggcacagacgatcaattgttgattttcgagcgcctatacttaacgttcatcccgtgaaataaggaagaacgatgccaacgaaaccgccttatcctcgtgaagcatatatagtgacgattgaaaaaggaaagccaggacagacggtaacctggtaccaactcagagccgatcatcctaaaccagactcgttgatcagtgaacatccgaccgctcaggaagcgatggatgcgaaaaaacgctatgaggaccctgacaaagagtgaccgcatcagactgctcggaagggattctgagtgccactacaagggatctgcgtcacatttttcataattcatgtttttctaataattagaatattaaacaataacaatccattactggaatcatttggaatctttacattatgccgtgcacgtctgctgctacgctttttgtcatttgtagcacaagtaagtgtcagcagtggtgcttcacacttgcccggtaattaacgacgaaagaaaagtaaggtggatgaacaatgagtgcgtcgttggcgatcctgaccatcggcattgtacctatgcaggaagttttgccgctcctgacggaatacattgacgaagataatatttcccatcatagcctgctggggaagttaagtcgtgaagaagtgatggcggagtacgcgccagaagcaggcgaagacaccattctcacattattaaatgacaaccagctggcccatgtttcgcgtcgcaaagtggagcgtgacctgcaaggtgtggttgaagtgctcgataatcagggttatgacgtcattttattaatgagtacagcaaacattagtagtatgactgcgcgtaatacgatctttcttgagccgtcgcgaatattgcctccactggtttcctctattgttgaagatcatcaggtgggggttatcgttccggttgaggagatgctgcccgttcaggcgcaaaaatggcaaattttgcagaaatcgccggtattttcattgggtaaccccattcatgattcagaacaaaaaatcattgatgccgggaaagaattactggcaaaaggggctgatgtcatcatgctggattgtttaggatttcaccaacgtcatcgcgatttactgcaaaaacagctcgatgttcctgtcttgctgtctaacgtattgattgcacggctggctgcggaattactggtgtaattttgcgtgacagccagcgcctctggcccctatagtgaagtagatgttcaactaccaaacagggccagtttatgcttcaaagtaatgagtacttttccggcaaagtgaaatcaatcggcttttccagcagcagcactggtcgcgccagcgtgggtgttatggttgaaggcgaatacaccttcagcaccgctgagccggaagagatgacggtaatcagtggcgcgctgaatgtgttactgcctgacgcgaccgactggcaggtgtatgaagccggttcggtgtttaatgttcccggtcacagtgagtttcatctgcaagttgccgaacccacctcttatctgtgccgctatctgtaattcctcgccttccccttgaacgggagggcatttttctgaaatatcctttctttagcccataataatatttcctttgctgcgattttttcaatttccgatatattcataatttatcaaggttgatataaatatcagtgaagatctccagatattgttgcggaactggctacgataaaagataaatcagatgatgaatggtggcgtgcattgctgcaaagtcgcaatgatcatttacgccaaacggcattgcgcaacgcacataccccggcgttgttgttaacgacattgactgagcctcaggatcggtcgctggctattaataatccacagctggctgccgatgtgaaaacggcgtggttaaaagaggatccatcattactcttatttgtcgaacaacccgatctttcgctgttacgtgatttagtgaaaaccggggcaacgcggaaaattcgcagtgaagcgcgtcaccggcttgaggaaaaacaatgacacaacgtccatggagcaagttacagcgtaaaacgcataatattgctgcgctaaaaattattgctcgccgtagcgaataattatatgcctggtgtggcttcgtacgccggataagacgcggcaggcgtcgcatccggcattaaaggaaaatcagcaattaacgttgtgcttcgccacctaatccttcaatcaggttttgaattaacgctgccagttcaccagtcatcaggatgaaatcggcatcaaaacgctgggcgaaatcttcacggtcgatatcttcgttttgatcgcgcagctcgtcgcagaacttcagacgcttgagcgaaccatcgtcgcacatcacaaactgaatgcgctgctgccagtcgagcgccagtttagtcaccacttttccggcttcaatgtgattggtgatctcttcgctggtcagatcttgtttcttcgcgcggatcacgccgccatcttccagcaacgatttcagctcggcttcatcaagcagctggaagccctgtgccgcactaccggagcgaacccattcggtcagcgtcagttcaatcgggttttccatgctcaatggtacaaccggtaacgaccccaggcttttacgcagtaatgccagcgtatcttccgcttttttggcactggcgcagtccaccataatcaaaccgttaaccgtgtcgatccacatcattgtctggctaaaacggctgaaagcacgcggcagcagagagtgcagcacttcgtctttcagcgaatctttttcggttttcttcagcttacgcgcctgttccgcttccagtttggcgattttcgcttccagcgcctgtttaatcaccggagacgggaggattttttcttctttgcgcgcgcagataacaatttgaccattggcaacgtgcgttaacgcatcgctgtgcgatcccatcggaggaacccagcccatcttcgccatgtcctggctgccgcatggggtaaatgccatcgaggctagctgtttttccatctcttctgcacgcagcgaaatctcgcggctaagacggtaaaccattaaatttttgaaccacagcatgataatttccacggccttgtcgttaaatttagcgggcatgataacgaattgtcggcggccttgcattgccaatccggttgtccgtctctacgctattgatattgaaaaaaataaggagagtaccgtgcgtataggtatcgatttaggcggcaccaaaactgaagtgattgcactgggcgatgcaggggagcagttgtaccgccatcgtctgcccacgccgcgtgatgattaccggcagactattgaaacgatcgccacgttggttgatatggcggagcaggcgacggggcagcgcggaacggtaggtatgggcattcctggctcaatttcgccttacaccggtgtggtgaagaatgccaattcaacctggctcaacggtcagccattcgataaagacttaagcgcgaggttgcagcgggaagtgcggctggcaaatgacgctaactgtctggcggtttcagaagcagtagatggcgcggcagcgggagcgcagacggtatttgccgtgattatcggcacgggatgcggcgcgggcgtggcattcaatgggcgggcgcatatcggcggcaatggcacggcaggtgagtggggacacaatccgctaccgtggatggacgaagacgaactgcgttatcgcgaggaagtcccttgttattgcggtaaacaaggttgtattgaaacctttatttcgggcacgggattcgcgatggattatcgtcgtttgagcggacatgcgctgaaaggcagtgaaattatccgcctggttgaagaaagcgatccggtagcggaactggcattgcgtcgctacgagctgcggctggcaaaatcgctggcacatgtcgtgaatattctcgatccggatgtgattgtcctggggggcgggatgagcaatgtagaccgtttatatcaaacggttgggcagttgattaaacaatttgtcttcggcggcgaatgtgaaacgccggtgcgtaaggcgaagcacggtgattccagcggcgtacgcggcgctgcgtggttatggccacaagagtaaaaaacgtaggcaattggcgcatcatgcctgatgcgacgcttgccgcgtcttatcaggcctacaaaaggtgccagaaccgtaggccggataaggcgttcacgccgcatccggcaataagtgctccgatgcctgatgcgacgcttgccgcgtcttatcaggcctgcaaaatgtgccagaaccgcgtagggcggataaggcgttcacgccgcatccggcaataagtaatgagcaccgagactataacctaccccagtggtttcgccagcaccggagtatccgccgcttgctggcgcttatagcgaccatacagcagcaacgacgacatcgcagcaaacgaaagcagggcggcaggcagcgccacgtaattatatgccagccccagcgtcagcatcatacctccgcaatatgcgccgacggcgctaccgaggttaaacgctatttgcccacctgcggcacctaataactctccgcctttggcgttttgtagtaacaatatttgtagcggtgctgaaagggcaaataatcccgcgcaacaaataaaagcaaaaataagcgacgttgttttcatgccgccgcagaaaaagagcatcagcagtgccagtacaattataaagtcagtcactgctgcaatgcgcagtggtgaataacgtcctgaaatcctgccacttagcatatttcccagcaccatccctagcccaactaacatcataataaaggtcatcgccgtttccgaaaaaccggaaataaacatcatgtatggctttacgtagctgaaccaggcaaacacacctgcgttgccaaacatcgtggcggcgaaaattaaccacggggccgggctgcgcaaaaagtgaaattgttcgcgcagatttcctttcgcctcgtcgcgaatatctggcacccaaaaatagaccgatgccatcaccgcaatattaaaaacagcgatcaataaaaaggtgtaacgccagctaaattcctgacttaaatacgttcccagcggaatgcccagcaaattggcgactgtcatcccggaaaccatccccgccacggcggcggtgacttttccgggtttgataatttttgataacacgatcgctccgacgccaaaaaatgcgccatgcggaaagccggataccagccgaccaatggcgagcatcaggtaagacgaagagagcgtgaacatggcgttgccaatgacgcacaacgccaccagaaacaacaagatatgtttgagtgagtagcggctggaaaagagtgcgatgattggcgcaccgaccaccacccccagtgcataatacgagatcatatgcccggcggcaggaatcgaaattcctacgttatgcgccagctccgtgagcacgcccataatgccaaattcggccatccccaaaccaaacgtgcccagagccaaagataaaatgacttttttcataccaccatcacaaccaccagaacggctaccaatcaccgtagccaataaagtgatagcttgcaggataacgaccagcaaggccaagagataattcgcccctctgtattcattatcctgctgaatagttatttcactgcaaacgtactttccagtttgctgtagcccaggccgttgatctttttcactttgatctgcaccggaatacgctctttcatcgcttctacgtggctaatcacaccgatggttttgccactggcgttcagggcatccagcgcatcaagggcggtatccagcgtttcgctatccagcgtgccaaaaccttcatcaaggaacagcgagtcaatacgtgttttatggctgaccagatccgaaagcgccagcgccagcgccagactaacgaggaaactttcgccgccggaaagggtacgggtatcgcgtaccgcatctgcctgccaggtatcaacaacctcgacttccagcgcctcgctggctttgcgctgtaacagatagcgcccgtgcagccgggtaagttgctgattagcgagatggactaaattatccagcgtcagcccctgggcaaacttgcggaatttatcgccctctttggaacctattagcgaattcagatatccccagtcctcaacctgctgcgtcatttgagcaatttgctgcattaaggtttgttgttgctgacggttatctgcatcctgcttcagctgctggcgaatctcgccttgactcgtggtgttttcacgcaacttttggtgagtttgcgctaactcttgctgaatctgctccaccgtcacagtgagagccaacccgtcgtcaggtcggtgttgttgatgctgtgccagcgtttctgctgtctgagtgaccagagtttgcgcctgacggcgctggttttccagattctgcttgagctgttccagctgcgttagtgtttgttcatccattagcgccgcaaggaacgcctgctgatcgtcaaagacgctggcctgtagcgcggtgtcaaactgcgcctgggctttttgcagactttgcgccgccagaacatcctgttgctgtaacgtctgctgctggctgtgtaatgcgagacattgttcatgtacctgccgccagttttccaataccacagtttcttcgcagtgcgggagttcatcactttgcggcaacgtttccagaatcggcgtcagctgctgaatacggttttgcagcgcggttaattcgttctggcgttgctgccagctctgcgcttcttgctgacgtgtcgccaaccagctctcttcttcatcttcctgtggcaatgtcagtgcataacccgtcaatgtcgttaaaagtagttgctggcgttgttcaatttgctgttgatactggataatttgctgattatgcgcggcaatctgcccttgtaattcatgccgttggctgagtaaccgcagctggcgttcgtgctcatcttgtgcatccagccacggttgaatatcgtccagtggctgcaaggtgatattgaggctggccgtgacggcttgccattgttgagtaagtgcttgctcatcttgtcggaggctttgcgcttcgttttcatcacgctgaagctgctttgttatggcgtccagttgcccacgtagcgtcgcaccttcttcaccgagctttttaacttcgttttccagcgccagtaatcgagactgattaacgccaggctccagcgcctgatacgcctcgaccgccgggtggctggtggaaccacaaagtgggcaaggctgacccgcctgtaactgtgcacgttgagcttccagcgttttgatgcgcgcttcctgctcgcaaatggttttcacatcggcaagttgctgcgtcttttctttataacgctggcgcatttcgttaagtgcggcgttacgttgcgtctgttcttgcgtgacattctggatagcgacctgtaactgcgccagacgtttttgttggggaacaatctgtccatgcagcgcgaccaggtgctgacgcagtgggcgttgctcagcatgttgcgccagggcggtagcaacttcatcggcggttaacgtcaacgtgatcgccgcaagcgcattaagtttttgctcagcatgggttaactgttgctgccattgccgcagatgctcgcgatcgctggtttgttgggagaactgcgcacgccaacccgccggttcgttgttccactgacggaagcggtcgtgttcctgtaaccaggtattcaggctttgttgctgctgctgtaattctgctgactgcttcgccgcgtggtggcgaatgctcgcgcgaagcgccattgtgctctgtaagcgagtatttacttcttcaatctgctggcgaatatgcgccagcgccgcgctgtgttctgcgatgcgttcccagtgtggacgaagatttcgtgccggttgtgccagactaagcgccgccagttgaggttgcgctttttcttcttcggctaacgcctgttgcaaggcctgctgacggcggctggcttcttgctgcaattcgtcctgacgcgttaaccagtttagcgattgttgttcttgctgctgcgcggtaattaactgtttttcttcgtcagtaagtacctgcaaactcgctgtcagcgattgcacttgttccggcgtgagcaacgtgacgccgctggcctgcgcttgcagcttctccagctctgtgcgggccgatttgtgctgctcaaaaaccatcgccgagatttgcccgtagatttcagtgccggttaactcctcgagcaattccgcgcgttctttgggtttggcattcaggaaggcagcaaattgcccctgcgaaagcagcatcgaacgggtgaagcgcccgtaatccagcccggttaacgtcgctgtcagttccagcttatctttcactttgtcggcgagaattttgccgtcggcgcagcgcgccagctctacgcgtggcacctgcaaattaccgtcgggttggttacgcgcccgattctggctccagaatgcacggtacgcttcacctttcacttcaaactccacctccgccagacattcggcggtatcgcgggtcatgagatcattttgcgattgtgaaacgttagagagacgcggagtttcgtgatacagcgccagacaaatggcgtccagcagggtggttttccccgcacctgttgggccggtaatagcaaacagcccgttgctggcgaacggctcgcgggtgaaatcaatcttccattcgccttttaatgagttcaggtttttcaggcgcaggctgagaattttcatgcttcgtgttctccggcgagggtatgcaacgtcgtggtgaaaagatgctgcagacgttgctgctgcgattcatccagttcttccagtgccagacggcgattgaacacctcttcgacgctgagttcgctgagggtttcacgctgttggctggctaacacacgctcgcgctgttcacgactccgacgtaccagcaatacttcgacaggcaatgattcggttaatgcctggattttgcgctgaatatcatgcagatactcatcagtagtgatttcgatatccagccagacaggtggctcctgcgatacatcgcgccactgttccagctgtgcggtaatcgacgccagatcgcctttcagcactgccatgggttgcgttaccggtacgttcaggttttccacgctctctaatttgccgtttgaaaatgtcaccagatggacatatttactcttaccgcattcatcaaaactcagtggaatgggggagccgcaatagcgaacatgttccatgccgccaataatctgtgcgcggtgaatatgcccgagcgcgatgtagtcggctggtggaaagttttgtgccggaaacgcgtccagcgtgccaatataaatgtcacgcacggcgtcacttttactggcccccacggtcgttaaatgtcccgtggcgatgatgggcagaggctgatcgccgcgcagtttgcaggcatcggcatagtgttgttggtaataatcggtaatcgctgccagtaaatgctgctgtttttcaataccgttaagccccgcctggctggtaataatgtcacgcggacgtaaaaacggaatggggcacagcactgcgcctggcgtcccgtcgcgacgaggcaagatttgcggcgcatgtccggcgctggcgaccacggtagtattgaggaacgccatgatatcgcgcgattcattcagcgtggcgaccgagtcatggtttcctgccagtaccaccagatgacagccagtttgctgtaaattgacaacaaaacggttgtataacgtgcgggcgtaactgggcggcgagccggtatcgaaaacatcaccggcaacaataatcgcatccacctgatgggtttgtgctgtctccagcagccagtcaagaaaagcctgatgttcagcttcgcggcttttactgtagaagttctggccgagatgccagtctgaggtgtgaaggatgcgcataacggttccctggcgaaaaagcatgggcgcgattatacccaaacagatgtgccatttgcttttttctgcgccacggaaatcaataacctgaagatatgtgcgacgagcttttcataaatctgtcataaatctgacgcataatgacgtcgcattaatgatcgcaacctatttattacaacagggcaaatcatggcgagacgtattctggtcgtagaagatgaagctccaattcgcgaaatggtctgcttcgtgctcgaacaaaatggctttcagccggtcgaagcggaagattatgacagtgctgtgaatcaactgaatgaaccctggccggatttaattctcctcgactggatgttacctggcggctccggtatccagttcatcaaacacctcaagcgcgagtcgatgacccgggatattccagtggtgatgttgaccgccagaggggaagaagaagatcgcgtgcgcggccttgaaaccggcgcggatgactatatcaccaagccgttttcgccgaaggagctggtggcgcgaatcaaagcggtaatgcgccgtatttcgccaatggcggtggaagaggtgattgagatgcagggattaagtctcgacccgacatctcaccgagtgatggcgggcgaagagccgctggagatggggccgacagaatttaaactgctgcacttttttatgacgcatcctgagcgcgtgtacagccgcgagcagctgttaaaccacgtctggggaactaacgtgtatgtggaagaccgcacggtcgatgtccacattcgtcgcctgcgtaaagcactggagcccggcgggcatgaccgcatggtgcagaccgtgcgcggtacaggatatcgtttttcaacccgcttttaacgccttgctcatcggacgcagagcagggcttatgatttcttaactggagtatcttacgtgctggaacggctgtcgtggaaaaggctggtgctggagctgctactttgctgcctcccggctttcatcctgggtgcattttttggttacctgccctggtttttgctggcatcggtaacaggactgcttatctggcatttctggaatttattgcgcctttcatggtggctgtgggtggatcgcagtatgaccccgccaccggggcgtggtagctgggaaccgctactatacggcttacaccagatgcagctgcgaaataaaaaacgccgccgtgaactgggcaatctgattaaacgctttcgtagcggcgcggagtcgctgcccgacgcggtggtgctgaccacggaagagggcggtattttctggtgtaacggtctggcgcaacaaattcttggtttgcgctggccggaagataacgggcagaacatccttaacctactgcgttacccggagtttacgcaatatctgaaaacgcgtgatttttctcgcccgctcaatctggtgctcaacaccgggcggcatctggaaattcgcgtcatgccttatacccacaaacagttgctgatggtggcgcgtgatgtcacgcaaatgcatcaactggaaggggcgcggcgtaacttttttgccaacgtgagccatgagttacgtacgccattgaccgtgttacagggttacctggagatgatgaatgagcagccgctggaaggcgcggtacgcgaaaaagcgttgcacaccatgcgcgagcagacccagcggatggaaggactggtgaagcaattgctgacgctgtcgaaaatagaagccgcaccgacgcatttgctcaatgaaaaggttgatgtgccgatgatgctgcgcgttgttgagcgcgaggctcagactctgagtcagaaaaaacagacatttacctttgagatagataacggcctcaaggtgtctggcaacgaagatcagctacgcagtgcgatttcgaacctggtctataacgccgtgaatcatacgccggaaggcacgcatatcaccgtacgctggcagcgagtgccgcacggtgccgaatttagcgttgaagataacggaccgggcattgcaccggagcatattccgcgcctgaccgagcgtttttatcgcgttgataaagcgcgttcccggcaaaccggcggtagcggattagggttagcgatcgtgaaacatgctgtgaatcatcacgaaagtcgcctgaatattgagagtacagtaggaaaaggaacacgtttcagttttgttatcccggaacgtttaattgccaaaaacagcgattaatccgcctttgtcatcttttattgccataagccagtcgatgctggcttattttctttgcagtcaaaatacgggcgttagattttacaacgattggtgattttttgttcgcatgattagccatgtctttttcacggaaatagtgttttatactggttggtgatttcttatcgctatatacctctggtttttagatccctccttgctttaaaacgttataagcgtttaaattgcgcttcaggtgctgtcatactgactgcattaacgcggtaaatcgaaaaactattcttcgccgcgcctggttgggagtatttcccgctaaaattgtttaaatataccgctgtatcatccccagggattggcacaaaaatttaacgttacaacaccacatccacaggcagtatgatttatgacccatcaattaagatcgcgcgatatcatcgctctgggctttatgacatttgcgttgttcgtcggcgcaggtaacattattttccctccaatggtcggcttacaggcaggcgaacacgtctggactgcggcattcggcttcctcattactgccgttggcctgccggtattaacggtagtggcgctggcaaaagttggcggcggtgttgacagcctcagcacgccaatcggtaaagtcgctggcgtactgctggcaacggtttgttacctggcggtggggccgcttttcgctacgccgcgtacagctaccgtttcctttgaagtggggattgcgccgctgacgggtgattccgcgctgccgctgtttatctacagcctggtctatttcgctatcgttattctggtttcgctctatccgggcaagctgctggataccgtgggcaacttccttgcgccgctgaaaattatcgcgctggtcatcctgtctgttgccgctattgtctggccggcgggttctatcagcacggcgactgaggcttatcaaaacgctgcgttttctaacggcttcgttaacggctatctgaccatggatacgctgggcgcaatggtgtttggtatcgttattgttaacgcggcgcgttctcgtggcgttaccgaagcgcgtctgctgacccgttataccgtctgggctggcctgatggcgggtgttggtctgactctgctgtacctggcgctgttccgtctggggtcagacagcgcgtcgctggtcgatcagtctgcaaacggcgctgctattctgcatgcttacgttcagcacacctttggcggcggcggtagcttcctgctggcggcgttaatcttcatcgcctgcctggtaacggcagttggcctgacctgtgcttgtgcagaattctttgcccagtacgtaccgctctcttatcgtacgctggtgtttatcctcggcggcttctcgatggtggtttctaacctcggcttaagccagctgatccagatctccgtaccggtgctgaccgctatttatccgccgtgtatcgcactggttgtattaagttttacacgctcatggtggcataattcgtcccgcgtgattgctccgccgatgtttatcagcctgctttttggtattctcgacgggatcaaagcatctgcattcagcgatatcttaccgtcctgggcgcagcgtttaccgctggccgaacaaggtctggcgtggttaatgccaacagtggtgatggtggttctggccattatctgggatcgcgcggcaggtcgtcaggtgacctccagcgctcactaaatcactgaacatttgttttaaccacggggctgcgatgccccgtggttttttattgtgttgatgggttaggaattgatggaaagtaagaacaagctaaagcgtgggctaagtacccgccacatacgctttatggcactgggttcagcaattggcaccgggctgttttacggttcggcagacgccatcaaaatggccggtccgagcgtgttgttggcctatattatcggtggtatcgcggcgtatatcattatgcgtgcgctgggggaaatgtcggtacataacccggccgccagctctttctcgcgttatgcgcaggaaaacctcggcccgctggcaggttacattaccggctggacctactgctttgaaatccttattgtcgccatcgccgatgtgaccgcttttggtatctatatgggtgtctggttcccgacggtgccgcactggatttgggtactgagcgtggtgctgatcatttgcgccgtaaacctgatgagcgtgaaggtattcggtgagctggaattctggttctcgttctttaaagtcgccaccatcatcatcatgattgtcgccggtttcggcatcatcatctgggggattggcaacggcgggcaaccgaccggtattcataacctgtggagcaacggcggcttcttcagtaacggctggcttggcatggtaatgtcgttgcaaatggtgatgtttgcttacggtgggatcgaaattatcgggattaccgccggtgaagcgaaagatcctgagaaatcgataccgcgtgcgattaactccgtgccgatgcgtattctggtgttctacgtcggtacgctgttcgtcattatgtctatctacccgtggaatcaggttggcactgccggtagcccgttcgtgctgacgttccagcatatgggcattacctttgccgccagcattcttaactttgttgtgctgactgcttcgctgtcggcaattaacagtgatgtatttggcgtaggccgtatgctccacggtatggcagagcagggcagcgcgccgaaaattttcagcaaaacgtcgcgtcgcggtattccgtgggttacggtgctggtgatgactaccgcgctgctgtttgcggtgtatctgaactacatcatgccggaaaacgtcttcctggtgatcgcttcgctggcaaccttcgccacggtgtgggtgtggattatgatcctgctgtcgcaaattgccttccgtcgccgtttgccgccagaagaagttaaggcgctgaaatttaaagtgccgggtggggtagcaacgaccatcggcgggctgattttcctgctctttattatcgggttgattggttatcacccggatacgcgtatctcgctgtatgtcggtttcgcgtggattgttgtgctgttgattggctggatgtttaaacgccgccacgatcgtcagctggctgaaaaccagtaatccttgcgttctgtaagccggttcaggaggaaatcctgatccggctattccgaaagttatccgcccccgtcctcctcccccaaatatccttcagatgatgagtgatcctgcattaggctatggcaaggtgatcagattttcatcacaggggaattatgatgttaaatgcatggcacctgccggtgcccccatttgttaaacaaagcaaagatcaactgctcattacactgtggctgacgggcgaagacccaccgcagcgcattatgctgcgtacagaacacgataacgaagaaatgtcagtaccgatgcataagcagcgcagtcagccgcagcctggcgtcaccgcatggcgtgcggcgattgatctctccagcggacaaccccggcggcgttacagtttcaaactgctgtggcacgatcgccagcgttggtttacaccgcagggcttcagccgaatgccgccggcacgactggagcagtttgccgtcgatgtaccggatatcggcccacaatgggctgcggatcagattttttatcagatcttccctgatcgttttgcgcgtagtcttcctcgtgaagctgaacaggatcatgtctattaccatcatgcagccggacaagagatcatcttgcgtgactgggatgaaccggtcacggcgcaggcgggcggatcaacgttctatggcggcgatctggacgggataagcgaaaaactgccgtatctgaaaaagcttggcgtgacagcgctgtatctcaatccggtgtttaaagctcccagcgtacataaatacgataccgaggattatcgccatgtcgatccgcagtttggcggtgatggggcgttgctgcgtttgcgacacaatacgcagcagctgggaatgcggctggtgctggacggcgtgtttaaccacagtggcgattcccatgcctggtttgacaggcataatcgtggcacgggtggtgcttgtcacaaccccgaatcgccctggcgcgactggtactcgtttagtgatgatggcacggcgctcgactggcttggctatgccagcttgccgaagctggattatcagtcggaaagtctggtgaatgaaatttatcgcggggaagacagtattgtccgccactggctgaaagcgccgtggaatatggacggctggcggctggatgtggtgcatatgctgggggaggcgggtggggcgcgcaataatatgcagcacgttgccgggatcaccgaagcggcgaaagaaacccagccggaagcgtatattgtcggcgaacattttggcgatgcacggcaatggttacaggccgatgtggaagatgccgccatgaactatcgtggcttcacattcccgttgtggggatttcttgccaataccgatatctcttacgatccgcagcaaattgatgcccaaacctgtatggcctggatggataattaccgcgcagggctttctcatcaacaacaattacgtatgtttaatcagctcgacagccacgatactgcgcgatttaaaacgctgctcggtcgggatattgcgcgcctgccgctggcggtggtctggctgttcacctggcctggtgtaccgtgcatttattacggtgatgaagtaggactggatggcaaaaacgatccgttttgccgtaaaccgttcccctggcaggtggaaaagcaggatacggcgttattcgcgctgtaccagcgaatgattgcgctgcgtaagaaaagtcaggcgctacgtcatggcggctgtcaggtgctgtatgcggaagataacgtggtggtatttgtccgcgtgctgaatcagcaacgtgtactggtggcaatcaaccgtggcgaggcctgtgaagtggtgctacccgcgtcaccgtttctcaatgccgtgcaatggcaatgcaaagaagggcatgggcaactgactgacgggattctggctttgcctgccatttcggctacggtatggatgaactaacgttttataacgccttgcgtgacgcctgcgccatcatccgcggataaaactgccagaagcgggtttcgagggcgtcataatgagcgtctaaatcgtaccaggagtcacgcagggcatccagacgtgggcggcggcttgccatgccgtttaacacgttctggatgaaatccatatcgcgatagcgcaccagccactgctctgaccacaagtaattgttcagattgataaaacgtggcggtgagtccggcaaaatcgtcatcacttgctcgcgggcataacagacaaattcctgtagcggaaagtccggcgacagctgcgaccagtggcgggaaagaaagtgatcccacatgacatccagcgtaataggcgcaacgcggcgcgtttcactacgaaaccactcccgtgcttcgcggacttccggcagattgtcagtcaatacgtcgatacgtcgatgcatatgaatgccagccacgacgtcgggcggaaaactttcttcaggatttccgcgtacgaaatcagccagtaaattgccggaaagcgagctttccgcgagatgggctaaatgcaggtgagctaaaaaattcatcgattatattctatccaaaagggggtaaaggttgcagggagagcgccccggcactagactacccgcctcttattttagtctgagtcagtgtcatgcgcgttaccgatttctcctttgaattgcccgaatccctgattgcccactatcccatgcctgaacgcagtagctgtcgtttactgtcgctggacgggccgacgggcgcgctgacgcacggtactttcaccgatttacttgataagctcaaccccggcgatcttctggtttttaataatacccgcgtgatcccggcgcgcctgtttgggcgtaaagccagcggcggcaagattgaagtgctggttgaacggatgctcgacgacaaacgcattcttgcgcatattcgcgcctcgaaagcgccaaaacctggcgcagaactgctgctgggcgatgacgaaagtattaacgcaacaatgaccgcgcgccacggcgcactgtttgaagtcgaatttaatgatgaacgctcggtgctggatattctcaacagcatcggccatatgccgctgccgccgtatatcgaccgtccggacgaagacgctgaccgcgaactttatcaaaccgtttatagcgaaaaaccgggcgcggttgcagccccgaccgcaggtctgcattttgacgagcctttgctggaaaaattgcgcgccaaaggcgtggagatggcgtttgtgacgttgcacgttggtgcgggcaccttccagccggtgcgcgtcgacaccattgaagatcacatcatgcactcggaatacgctgaagtaccgcaggatgtggtagacgcggtactggcggcgaaagcgcgcggtaaccgggtgattgcggttggcaccacttcagtacgttcgctggaaagcgcggctcaggcagcgaaaaacgatctcattgaaccgttcttcgacgatacccaaatctttatctatccgggcttccagtacaaagtggtcgatgcgctggtgacgaacttccacttgccagagtcgacgctgattatgctggtttcggcctttgccggttatcaacacaccatgaacgcctataaagcagcggtagaagagaaatatcgcttttttagttacggtgatgcgatgtttatcacgtacaatccgcaggcaattaatgagcgcgtcggggagtaattccgcggcgctggtttaaaacgttggactgtttttctgacgtagtggagaaaaaatgaaatttgaactggacaccaccgacggtcgcgcacgccgtggccgcctggtctttgatcgtggcgtagtggaaacgccttgttttatgcctgttggcacctacggcaccgtaaaagggatgacgccggaagaagttgaagccactggcgcgcaaattatcctcggcaacaccttccacctgtggctgcgcccgggccaggaaatcatgaaactgcacggcgatctgcacgattttatgcagtggaaggggccgatcctcaccgactccggcggcttccaggtcttcagccttggcgatattcgtaaaatcaccgaacagggcgtgcacttccgtaacccgatcaacggcgatccgattttcctcgatcctgaaaaatcaatggagattcagtacgatcttggttcggatatcgtcatgatctttgatgagtgtacgccgtatcctgctgactgggattacgcaaaacgctccatggagatgtctctgcgttgggcgaagcgtagccgtgagcgttttgacagtctcggaaacaaaaatgcgctgtttggtatcatccagggcagcgtttacgaagatttacgtgatatttctgttaaaggtctggtagatatcggttttgatggctacgctgtcggcggtctggctgtgggtgagccgaaagcagatatgcaccgcattctggagcatgtatgcccgcaaattccggcagacaaaccgcgttacctgatgggcgttggtaaaccagaagacctggttgaaggcgtacgtcgtggtatcgatatgtttgactgcgtaatgccaacccgcaacgcccgaaatggtcatttgttcgtgaccgatggcgtggtgaaaatccgcaatgcgaagtataagagcgatactggcccactcgatcctgagtgtgattgctacacctgtcgcaattattcacgcgcttacttgcatcatcttgaccgttgcaacgaaatattaggcgcgcgactcaacaccattcataaccttcgttactaccagcgtttgatggcgggtttacgcaaggctattgaagagggtaaattagagagcttcgtaactgatttttaccagcgtcaggggcgagaagtaccacctttgaacgttgattaatattaataatgagggaaatttaatgagcttttttatttctgatgcggtagcggcaacgggtgcaccggcgcaaggtagcccgatgtctttgattttgatgctggtggtattcggtctgattttctatttcatgatcctgcgtccacagcagaagcgcaccaaagaacacaaaaagctgatggactccattgccaaaggtgatgaagttctgacgaacggtggcctggttggtcgcgtaaccaaagtagcggaaaacggctacattgctatcgcgctgaatgacaccactgaagtagttattaaacgtgacttcgtagctgccgtcctgccgaaaggcaccatgaaggcgctgtaattaaaatttttccctaagggaattgccgtgttaaaccgttatcctttgtggaagtacgtcatgctgatcgtggtgattgtcatcggtctgctgtatgcgcttcccaacctgtttggtgaggatccggctgttcagatcactggtgcgcgcggagtcgccgccagtgagcaaacgctgatccaggtccagaaaacgttacaagaagaaaaaataactgctaagtctgtggcactggaagagggcgctattcttgcgcgcttcgactccactgacacccagttgcgcgctcgtgaagcattaatgggcgttatgggtgacaaatacgtcgtggcgcttaaccttgccccggcaacgccgcgctggctggcagctattcacgctgagccgatgaagctcggccttgacctgcgtggcggcgttcacttcctgatggaagtggatatggacaccgcgcttggcaaactccaggaacaaaatatcgatagcctacgcagtgacctgcgcgaaaagggcatcccgtataccactgttcgtaaagaaaacaactacggcctgagcatcactttccgcgatgctaaagctcgtgatgaagccattgcgtatctgagcaagcgccatccggacctggtgattagcagccagggcagcaaccagctgcgtgcggtaatgagcgatgctcgtctgagtgaagcgcgtgaatatgcggtgcagcagaacattaatatcctgcgtaaccgtgtaaaccaacttggcgtggcggagccggtggttcagcgtcagggtgctgaccgtatcgttgttgaactgccaggtattcaggacactgcgcgtgcgaaagagattctgggtgcgacggcaacgctggaattccgtctggtaaacaccaacgttgaccaggccgctgcggcatccggtcgcgtaccgggcgactctgaagtgaaacagacccgcgaaggtcagccagttgtgctgtacaaacgcgtaattctgaccggtgaccatatcaccgactccacttccagccaggacgaatacaaccaaccgcaggttaacatctcgctcgatagcgctggtggtaacatcatgtctaacttcactaaggacaacatcggcaaaccgatggcaaccctgtttgtggagtacaaagacagcggtaagaaagatgcaaatggtcgtgcggttctggtgaaacaggaagaggtgattaacatcgccaacatccagtctcgtctgggtaacagcttccgtatcaccggcatcaacaacccgaacgaagcccgtcagctgtcactgctgctgcgtgccggtgcgttgatcgcgccgattcagattgttgaagaacgtaccattggcccaaccctgggtatgcagaacattgaacaggggctggaggcttgccttgccggtctgctggtttctattctgttcatgatcatcttctataagaagtttggtctgattgcgaccagtgctctgattgccaacttgatcttaatcgtcggcattatgtcgctgttgccaggcgcaacgctgagtatgccaggtatcgcgggtatcgtcttaacccttgcggtggcggtcgatgcgaacgtactgatcaacgaacgtattaaagaagagttgagcaacggacgtactgttcaacaggcaattgatgaaggttatcgtggcgcattcagttctatcttcgatgcgaacatcaccacgctgattaaagtcatcatcctgtacgcagtgggtaccggggcaattaaagggttcgcgattactaccggtatcggtgtggcgacgtcgatgtttaccgcgattgtcggtacgcgtgccatcgtaaacctgctatatggcggcaagcgcgtcaagaagctgtcaatctgaggagtgcgatgtggcacaggaatatactgttgaacaactaaaccacggccgtaaagtctatgactttatgcgctgggactactgggctttcggcatctctggtctgctgttaatcgctgctatcgttattatgggcgtgcgcggctttaactgggggctggatttcaccggtggtacggttattgaaattacgctcgaaaaaccggctgaaattgacgtaatgcgtgatgcattgcaaaaagccggttttgaagagccgatgctgcaaaactttggtagcagccatgacatcatggtccgtatgccgcctgctgaaggcgaaaccggcggtcaggtgttgggcagccaggttctgaaggtgattaacgaatccaccaatcagaatgcagcagtgaagcgtattgagttcgtcggtccgagcgtgggggcagaccttgcgcaaaccggtgcgatggcgttgatggcagcgctgctgtctatcctcgtgtacgtaggtttccgctttgagtggcgactggcggcaggggtggttattgcgctggcgcacgacgttatcattacgctgggtattttgtcgttattccatatcgagattgacctgaccattgtggcatcgttgatgtcggttatcggttactcgcttaacgacagtatcgtggtatcggaccgtattcgtgaaaacttccgcaagatccgtcgcggtacgccttacgaaatctttaacgtgtccttgacccagacgctgcaccgtaccttgatcacatccggtactaccttgatggttatcctgatgctgtacctcttcggtggtccggtactggaaggcttctcgctgaccatgcttatcggtgtttccatcggtactgcatcttccatctatgtggcatctgcgttggctctgaaactgggtatgaagcgcgaacacatgttgcagcagaaagtggaaaaagaaggggcggatcagccgtcaattctgccgtaatcaagttcccgttgatgttgaaaatcccggtcagaagatcgggattttttttgatgtatggagattgcgaaaatccccgcatcttgggaaactgcgcgtaaccctacatttcatccaggtaacttttcatggctatcatcccaaaaaactatgcgcggttagaaagcggctatcgcgaaaaagcattaaaaatctatccgtgggtctgcggtcgctgttcccgcgagtttgtttattccaacctgcgtgaacttaccgttcaccacattgatcacgaccataccaataacccggaagatggcagtaactgggaattgttgtgtctctattgccacgatcatgagcattcgaaatataccgaagcggatcagtatggtacgaccgttatcgcaggggaagatgcgcagaaagatgtcggtgaagcgaagtacaacccattcgctgacctgaaagcgatgatgaacaagaagaagtgattaaaacgtaaaattgcctgatgcgctacgcttatcaggcctacgttatttcagcaatatattgaatttacgtgcttttgttggccggacaaagcgtttacgccgcatccggcatgaacaaagcacacgttgttaacaatcagaaatgccgggaataaatcccggcattttcataatcagaagttgtaacctactaccaggtaaccaccccagccggtagagcgaacgttgaagttgccgttgccgaagttcagttctgcatcgtcgttccactgaccaccgtcgtgccagtaacgagctacgacagagtagtgccagtgatcgtagttcagagccagaatatggctggaagcgatagagttattagtacgggtcttaataccgttgattgcgttaccgctgtcatcccctaaatcggaaccccagtcgaagttggtgaagccgatgtagctcagctgaccgccccacagatcggtaatcggcacaaagtatttaattttgaaacggtaaccgtcccactcgttttcgttcgctgcgccatagttctgccactggtatttcgcatagacgttcatggacaggctcatcggcaggccagtgtcgatatcggtacccagacccatgtaccaggtgctctggcgaccatctttattacgacccatgtcgtaaatgtagttgttcgcgaagtaccactctttgaacggaccgaagctaaggtcagtattggtcagcttgtcgatggagaaacgtggttcgatttccataaacagcggagaaccgtggttccagatacctttagcatcggagttaccgccgaagaataccggcgcatccgcataaccatagaagtcgaaccagtcttttttagcgaatgcttcgtactcaaggtaggtatcgttgcggatctgcggtccgaaacgggtgtgatagcttccgacaacgttaacgctctggtgccaccagtcggaaagatactgcggtttgtcgttttcagctgcgttgacagtaaaagacgaagagagcgccagtaccgcaccggctgccagtaatgtttttttcatatgtatgccactgtttgaaaatcccttgcgggagtgaaaaaggcgcaaattgcgtttctaaatatttcgtatacagaggagcctattataaaaatcattgctcacaaaaatatgtttcgtttcacagttctatcatttacgtaatcgattgcgttcacgtttacacacattcgggcggggattgtactgactttcgcccttgttgcaaacttttactatcaatccaggtgatgtaagcagagtaacaaaatgacggggaaagatgttgcgggacgcacaaaatcgtcccgaaatacgtttactgcataacaggttgaatgtcgtggatacgtacaaagcctaactgatccacagaaatcccctttaactgtaacggaatatcaacatcgctgggggcgaggacgctggcaggggcattaatcaattgattctgcacattgatttcctgaaagttgtctattgttccctgaatttgcccatattcaacagttccgctgaatgcgggcaagggatcattcgactcaccctgaatacgtagtgtaagggtggtgccatctgcatcaggcgtaatattcaccagcgacatacgtaaagtaccgatctggctttccagtcttgccggtgttttcgctccaggcagaaggtaaaccccactgctggattttgcattcagcctgttttgctgagtgattttgactgtttcttgattgagttgcgtcatctcctggttcagcgtgctgacgctgtgtttcatctgtcgcacttcactttgctgcacacaggcgctaaggctgaacaggcttcccagcaggagcagtcgaaaaacgttagtattcataggtcgtccctttctcgtcgcaattagcctaatggtagagggtaaaagcagcgaaagcatcgatcctttatctcaaaagcgttgcgcctttgttgtatcgtcagttcagggtaaaatagatttccgttaaccacctggtcaggacgccgtatgcattgcccattctgtttcgccgtggacactaaggtaattgactctcgtctcgtgggcgagggttcatccgtacgccgccgtcggcagtgtctggtgtgtaatgaacgtttcaccacctttgaagtggcggagctggttatgccgcgtgttgtaaaaagcaacgacgtgcgtgaaccgtttaatgaagagaaattgcgtagcggaatgctgcgggcgctggaaaaacgtccggtgagttccgatgacgtcgaaatggcaatcaatcatattaaatcgcagctgcgcgccaccggtgagcgcgaagtgccgagcaagatgattggcaatctggtgatggagcaattgaaaaagctcgataaagtcgcctatatccgttttgcctctgtctaccgcagtttcgaagatatcaaagaatttggcgaagagatcgcgcgcctggaggactaagccgtgcaggacgagtattacatggcgcgggcgctaaagctggcgcaacgaggacgttttaccacgcatcccaacccgaatgtcgggtgcgtcattgtcaaagatggcgaaattgtcggtgaaggttaccaccaacgtgcgggtgaaccacatgccgaagtacacgcgttgcgtatggcgggtgaaaaagccaaaggtgcgaccgcctatgtcacactcgaaccctgtagccatcatggtcgtacgccaccgtgctgtgacgcactcatcgccgctggcgtagcgcgcgtggttgcctcgatgcaagatcctaacccgcaggtcgctgggcgtggactttaccgtctgcaacaggctggcattgacgtcagccacggcctgatgatgagtgaagccgagcaattgaataaaggctttctcaagcggatgcgcaccggctttccttatattcagttaaaacttggcgcatcgcttgatggtcgcacggcgatggcgagcggcgaaagccagtggatcacttcgccccaggcgcggcgtgatgtacaactactgcgcgcgcaaagtcatgccattttaaccagcagcgccacggtgctggcggatgatcctgccttaacggtgcgttggtctgaactggatgaacaaactcaggcgctctatccgcaacaaaatctccgtcagccgatacgtattgtgattgatagccaaaatcgcgtgacgccggtacatcgcattgtgcagcagcccggcgaaacctggttcgcgcgtacgcaggaagattctcgtgagtggccggaaacggtgcgtaccttgctgattccagagcataaaggtcatctggatctggttgtactgatgatgcaactgggtaaacagcaaattaacagcatctgggtggaagcggggccaacgctcgctggcgcattgctgcaggcgggtttagtcgatgagctgattgtctatatcgcacctaaactattaggcagcgacgcccgcggattatgcacgctgccagggcttgagaaattagccgacgccccccaatttaaattcaaagagatacgtcatgtaggcccggatgtttgcctgcatttagtgggtgcatgatctcccggctcgaaagggaagcagcgcacgaaatattatgctaaaatccgcccccctgcggggccatactcgaacccgaaggaagaaaatgaacattattgaagctaacgttgctaccccggacgctcgcgtcgccatcaccatcgcgcgtttcaacaactttatcaatgacagcctgctggaaggtgcaattgacgcactgaaacgtatcggtcaggtaaaagatgaaaacattaccgttgtttgggtgcctggtgcctatgagctgccgctggcggcgggtgcactggctaaaaccggtaaatacgacgcggtgattgcgctgggtacggttattcgtggtggcactgcccactttgaatatgtcgctggtggtgcaagcaacggcctggcgcatgttgcccaggacagcgaaattccggttgcttttggggttctgaccactgaaagcattgaacaagcgatcgaacgtgctggcaccaaagctggcaacaaaggtgcagaagctgcactgaccgcgcttgaaatgattaatgtattgaaagccatcaaggcctgaaattagtaaggggaaatccgtgaaacctgctgctcgtcgccgcgctcgtgagtgtgccgtccaggcgctctactcctggcagttgtcccagaacgacatcgctgatgttgaataccagttcctggctgaacaggatgtaaaagacgttgacgtcctgtacttccgtgagctgctggccggggtggcgactaataccgcatacctcgacggactgatgaagccatacctgtcccgcctgctggaagaactgggacaggtagaaaaagcagtactgcgcattgcgctgtacgaactgtctaaacgtagcgatgtgccatacaaagtggccattaacgaagcgatcgaactggcgaaatcgttcggcgcagaagacagccataagttcgtcaacggcgtactcgataaagcagcacctgtgattcgccctaacaaaaagtgatatccaggccggtagattcacggaagaccgttccatgatcgccggccttttcttttttacctgctgaggcataacgtatggcatgtggcgagttctccctgattgcccgttattttgaccgtgtaagaagttctcgtcttgatgtcgaactgggcatcggcgacgattgcgcacttctcaatatccccgagaaacagaccctggcgatcagcactgatacgctggtggcgggtaaccatttcctccctgatatcgatcctgctgatctggcttataaagcactggcggtgaacctaagcgatctggcagcgatgggggccgatccggcctggctgacgctggcattaaccttaccggacgtagacgaagcgtggcttgagtccttcagcgacagtttgtttgatcttctcaattattacgatatgcaactcattggcggcgataccacgcgtgggccattatcaatgacgttgggtatccacggctttgttccgatgggacgagccttaacgcgctctggggcgaaaccgggtgactggatctatgtgaccggtacaccgggcgatagcgccgccgggctggcgattttgcaaaaccgtttgcaggttgccgatgctaaagatgcggactacttgatcaaacgtcatctccgtccatcgccgcgtattttacaggggcaggcactgcgcgatctggcaaattcagccatcgatctctctgacggtttgatttccgatctcgggcatatcgtgaaagccagcgactgcggcgcacgtattgacctggcattgctgccgttttctgatgcgctttctcgccatgttgaaccggaacaggcgctgcgctgggcgctctctggcggtgaagattacgagttgtgtttcactgtgccggaactgaaccgtggcgcgctggatgtggctctcggacacctgggcgtaccgtttacctgtatcgggcaaatgaccgccgatatcgaagggctttgttttattcgtgacggcgaacctgttacattagactggaaaggatatgaccattttgccacgccataaagatgtcgcgaaaagtcgcctgaagatgagtaatccgtggcatctacttgctgtcggattcggaagtggattaagcccgatcgttcctgggacgatgggctcgctggcagcgattccgttctggtatctgatgacctttttgccctggcagctctactcgctggtggtgatgctggggatctgtatcggcgtctatctttgtcatcaaacggcgaaagacatgggtgtgcacgatcatggcagcattgtctgggacgaatttattggtatgtggatcacgctcatggcgctgccgaccaatgactggcagtgggttgccgccgggtttgtgattttccgtattctggatatgtggaagccgtggccgatccgctggtttgatcgcaatgtgcatggcggcatggggatcatgatcgacgatattgtcgccggggtgatttccgcaggcatcctgtattttatcggtcatcactggccgctgggtattctgtcgtagttgtgcaccgatgcctgatgtgacgcttgtcacgtctcatcaggcctggactcttatttaaatcctacgacaggatgcggtttatacggcgtttccagttcggcaatctgttccggcttcaaagtgatatccaccgcgttcaatagctcatcaagctgttcttcgcgcgaagttccgataatcggtgcggcaatgcccggtttactcaacaaccaggccagcgcaacttgtgctcgtgtcgcccccagttcttcactgacgcctgttaaccgctctgcgatctgcgcgtcattttcatcgctttctttatagagatttttccccacctcatcagacaccagtcgtgcggtagtttctccccacggacgcgtcagacggccccttgccagcgggctccatggaattaccgccacgccctcctgataacacagtggtagcatctcgcgctcttcttcacgataaatcagattgtagtgatcctgcatactgacaaactgcgcccagccgtgctgtttttggagttccagtgcctgagcaaactgcgaagcgtgcattgatgacgcgccgatataacgcgctttcccggcttttaccacgtcgttgagggcttccagcgtctcttcgatcggcgtgttgtaatcccagcgatgaatttgcaggatatcgacataatccatgccgagacgtcgcaggctgtcgtcgatagagcgcaaaatttgcgcacgggataatccttccggtaaatcaccaacgcgatggaacactttggtcgcaacgaccacgtcttcacgacgggcgaaatcccgcagtgcgcgaccgacgatctcttcgctgctgccgtcagaataactgttggcggtatcaaagaaatttatgccgccttccagtgcacgtttaattatgggacggctgctttcttccggcagtgtccatgcgtgattaccgcgatctggctcgccaaaggtcatacagccgaggcaaagtcgggaaacgcgaaggtcggtttttcctaaggggttgtattgcatgctgccactcctgctatactcgtcatacttcaagttgcatgtgctgcggctgcattcgttcaccccagtcacttacttatgtaagctcctggggcttcactcgtttgccgccttcctgcaactcgaattatttagagtctatgaataatttcttaagcatagcaggagtggagtagggattatgccagccaggccttgattttggcttccataccagcggcatcgaggccgagttcggcgcgcatttcttcctgagttccttgcggaataaagaagtccggcaggccaatgttcagcacgggtactggtttacgatgggccatcagcacttcgttcacgccgctgcctgcgccgcccataatggcgttttcttctacggtgaccagcgcttcatggctggcggccatttccagaattaacgcttcatcaagcggtttcacaaaacgcatatcgaccagcgtggcgttcagcgattcggcgactttcgccgcttctggcatcagcgtaccaaagttaaggatcgccagtttctcgccacgacgcttcacaatgcctttgccaattggtagtttttccagcggcgtcagttccacgccgaccgcgttgccacgcgggtagcgcaccgctgacgggccatcgttatagtgatagccggtatagagcatctggcgacattcgttttcatcgctcggggtcataatgaccatttccggtatgcagcgcaggtaagagagatcaaaagcaccctgatgggtttgaccgtcagcaccaacaatgcccgcgcggtcgatggcgaacaggaccggaagcttttgaatcgccacgtcatgcagcacctgatcataggcgcgttgcaggaaagtggagtaaatcgcgacaatgggtttgtacccaccaatcgccagacccgcagcaaaggtcaccgcgtgttgctcggcaattgccacgtcgaagtagcgatccgggaatttacgtgaaaactcgaccatgccggaaccttcacgcatcgccggagtaatcgccatcagcttgttgtctttcgctgccgtttcgcacaaccagtcgccaaagatttttgaatagctcggcaaaccgccgctacttttcggcaaacaaccgctggagggatcaaatttaggcacggcgtggaaagtgatcgggtctttttctgccggttcataaccacgaccttttttggtcatgatatgcaggaactgcgggcctttcaggtcgcgcatgttctttagcgtggtgataagccccagcacatcgtgaccgtccaccgggccgatgtagttaaagcccagctcttcaaacaacgtgccaggcactaccatgcctttaatatgttcttcggtgcgtttgagcagctctttaattggcggcacgccagagaaaacttttttcccgccttcgcgcagtgaagagtaaagcttaccggaaagcagctgtgccagatggttgttgagcgcgccgacattttcggaaatcgacatttcattgtcgttgagaatcaccagcatatcaggacggatatcgcccgcgtgattcatcgcttcaaacgccatgcctgcggtaatcgcgccatcgccaatgacacagacggtgcggcgatttttgccttctttttcggcagcaaccgcaataccaattccggcactgatggaggttgatgaatgcccgacgcttaatacgtcatattcgctttcgccgcgccacgggaacgggtgcagaccgcctttctgacggatggtgccgattttgtcgcggcgtccggtcaaaattttatgcggataagcctgatgccccacatcccaaatcaattggtcaaacggggtgttgtagacatagtgcagcgccacggtcagttcgaccgtgcccagcccggaggcgaagtgcccgctggaacggctcacgctgtcgagtaaatagcggcgcagttcgtcgcagagtttcggtaaactctctttcggcaacagtcgtaactcctgggtggagtcgaccagtgccagggtcgggtatttggcaatatcaaaactcatcaggggcctattaatacttattgtttatttattacgctggatgatgtagtccgctagcgcttccagtgccgaggtatcgagtgactgttcagccagttgtttcagcgactgacgggcatcgtcgatcagatcccgggctttcttccgggcttgctcaagacccagaagtgcagggtaggtacttttaccaagttgctggtcggcaccctggcgttttcccaacgttgcagtatctcccaccacatccaggatgtcatcctgaacctggaaggcaaggccgatgctctctgcatacttgtcgagtaccggcagagcacgacgtcctttatctccggcgcttaatgcaccaaggcgaacggcggcgcgaatcaatgcgccggttttatgacgatgaatacgctcaagcgcgtccagaggtacgtgtttgccttccgcgtctaaatctaatgcctgaccaccgcacattccggcaataccactggcgctcgccagttcagaaatcatcgaaattctgtcgcggtccgacacttccggcatatcggcatcgcttaaaatcgagaacgccagcgtttgtaaagcgtcgccagcgagaatcgcgtttgcttcgccaaacttcacatggcaggttggcaaaccgcgacgcagatcgtcatcatccattgccggtaaatcatcatgaattaatgagtaagcgtggatacactcaacggcggcagcgggtgcgtccagcgtgtttgtgctaacgccgaacatatgaccggtggcataaaccaggaaaggtcgcaggcgcttaccacctaataatgcgccatactgcatggtttcgaccacgggagtgttctgaaagggcagtggggcgataaaacggctcagcgcctggttggcctgcttaacgcaggcttcgagttgctgcggaaagtccattactcattgtccggtgtaaaaggggttagagaggcgtcttcattgtcagacagcagaatttgtacgcgctgttcggcttgttgtaatttggcctgcccctgacgtgccagctgcacgccgcgttcgaactcgttcagcgcctcttccagcggcaggtcgccactttccagacgggttacaatctgttccagctcgctcagcgccttttcaaagctggcgggcgcctcatttttcttcggcataatgaatgtctgactctcaatatttttcgccccgtcatggtaacggactcagggcaaatagcaaataacgcgcaatggtaaggtgatgtgcacagcaaagcgatgttagtggtatacttccgcgcctggatgcagccgcaggtgtgggctgctgtatttttccctatacaagtcgcttaaggcttgccaacgaaccattgccgccatgaagtttatcattaaattgttcccggaaatcaccatcaaaagccaatctgtgcgcttgcgctttataaaaatccttaccgggaacattcgtaacgttttaaagcactatgatgagacgctcgctgtcgtccgccactgggataacatcgaagttcgcgcaaaagatgaaaaccagcgtctggctattcgcgacgctctgacccgtattccgggtatccaccatattctcgaagtcgaagacgtgccgtttaccgacatgcacgatattttcgagaaagcgttggttcagtatcgcgatcagctggaaggcaaaaccttctgcgtacgcgtgaagcgccgtggcaaacatgattttagctcgattgatgtggaacgttacgtcggcggcggtttaaatcagcatattgaatccgcgcgcgtgaagctgaccaatccggatgtgactgtccatctggaagtggaagacgatcgtctcctgctgattaaaggccgctacgaaggtattggcggtttcccgatcggcacccaggaagatgtgctgtcgctcatttccggtggtttcgactccggtgtttccagttatatgttgatgcgtcgcggctgccgcgtgcattactgcttctttaacctcggcggcgcggcgcatgaaattggcgtgcgtcaggtggcgcattatctgtggaaccgctttggcagctcccaccgcgtgcgttttgtcgctattaatttcgaaccggtcgtcggggaaattctcgagaaaatcgacgacggtcagatgggcgttatcctcaaacgtatgatggtgcgtgccgcatctaaagtggctgaacgttacggcgtacaggcgctggtcaccggcgaagcgctcggccaggtgtccagccagacgctgaccaacctgcgcctgattgataacgtctccgacacgctgatcctgcgtccgctgatctcttacgacaaagagcacatcatcaacctggcccgccagattggcaccgaagactttgctcgcacgatgccggaatattgtggtgtgatctccaaaagcccgacggtgaaagcagttaaatcgaagattgaagcggaagaagagaagttcgacttcagcattctcgataaagtggttgaggaagcgaataacgttgatatccgcgaaatcgcccagcagaccgagcaggaagtggtggaagtggaaaccgtcaatggcttcggcccgaacgacgtgatcctcgatatccgttctatcgatgaacaggaagataagccactgaaagtcgaagggattgatgtggtttctctgccgttctataaactgagcaccaaatttggcgatctcgaccagaacaaaacctggctgctgtggtgtgagcgcggggtgatgagccgtctgcaggcgctctatctgcgcgagcagggctttaacaatgtgaaggtatatcgcccgtaatttgtggtttttacgtcgcatctggtcagatgcgacgtttgccgcatccgacactactcgtaataattataaatccctgccgccatcaccagttgtgatgccacttcatgggctttttcacgcccaaccaacaggtcgataattttcagaccaaagtcgatagctgtacccggcccctggctggtcagcaattttacccgtgcatcccagacgacgcgcttgtccagccattgttcggcgggaattttgtctttcagcgtcgggaagccggtcatattaccaatcgggaagatatcgtgcggcaccagcacggtggctggcgcggcgcaaatagccgcgacgatacgcccggaacggtggaactgtttaacggtttcaaccagcagagtgctatcgcgaaaacactccgcgcctttaatgccaccaggcagcacgatcacgtcatattcgccatcagccacttcgaccagcggcgcatccgccagcagcttcacgccgcgcgagcaggtaatcgccaggttaccatcgctggcgacgctggcagtggtgactttgataccgccgcgaaccagcagatcgatagtggtgacggcttcagtctcttcactaccaggggcgaggcaaaccagtgccgatgcgctcatattcactctcctttctttttaccatttcaaacaggcgggtgttttccggtacggcaatcccatgcgcgcgggcgcggcgtaagagaaaaccattgatatagtcgatttcagtgtggcgcagcgcgcggatatcctgcaacatcgacgagatattttccgctgtggcatcaatcacctgcatcacgtaatcacgcaaatcttctgctgaagtatgatgcccttcgcgttcgatcaccgccgcgacttcttcgcatatctgcataatttcttgcggatgatgacgtaattcaccgttcgggcaattccagatggcagtcagtggattaatcacgcagttgactgccagcttgcgccacagctcggcgcgaatattgttatgccaggcaacgtcaggcaacacggtttgcaaaatatccgccagataactgtaatccccgtcctgttgccgtgccgggccaatatgcgtgataccgtttgccacatgaataatgacattgccgtcgcggcgggctgcatgggtggtggtgcccatcagtaatggctgctgaatgttttgcaactcttcgatggtgcccatgccgttgtgaattaacagtattggcgtagttacaggcagtgtggacgcgaggcttttgacggcatcggaaacctgccatgctttcagcgtcaccaggagcagatcgctggtggcgagaaaatcgggatcgttggcggtcagcgattcgttaaatatcgaaccatctgtctcaaccagattcacgctacaataaggttgcggtacgcgcagccagccctgaacttcatgaccctgtttgcaaagtgctgtaagccataattgccctaaggcaccgcatcccaatacggtaattttcattgttcctcctcacccgcaaccactccgggtgttcaataaggctatcccttaattgtgcatgctgttgcgactatgcacaattaagggatacgtcctggtgcaggactgtcggttatttaactttgcgggtattatgcttcgcatcaaaaatgaagggagaggaaaagatgccatctttcgatattgtctctgaagttgatcttcaggaagcacgtaacgcggtcgataacgcgagccgcgaagtggagtcccgttttgacttccgtaacgttgaagcctcatttgagctgaacgacgccagcaaaaccatcaaagtgttgagcgagtccgatttccaggtcaatcagttgctggatattctgcgtgccaagctgctgaagcgcggcattgaaggcagttcgctggatgtaccggagaatatcgttcatagcggtaaaacctggtttgtggaagcgaaactgaaacagggcattgagagcgcgacccagaagaaaatcgtcaagatgatcaaagacagcaaactgaaagtgcaggcgcaaattcagggcgatgaaatccgcgtaacgggcaaatctcgtgatgatttgcaggctgtcatggcgatggtacgtggtggcgatctcggtcagccgttccagttcaaaaacttccgcgattaatcgcgactatgtgcgttttgttcatgtcagatgcggcatgaacgcctgattcggcctacaaaggtttgtaattcagaaactttgtaggcctgataagcgtagcgcagcaggcaattcgccgcgttttttatgcctgacgaattgcctgttctatctcaaagcgattcgtcactttgctgtcgattttcacataagctgaatgttcttcttctgcaatcaacacttctttgatgccttcagtttctagcaaacgcacttttaacgcctcgtttgcggcaatgttcgccgggatttcaatgcgcaaactgctgacatacggcggttctttcatggtactggcgactgtcagccacactgcggccagcattgcgccagcgagaaataccccctgaccgtcaaacatgccgttaatccagccgcccagcgaaccgccaatcgccacgccaagaaactggctggtggagtaaacacccatcgccgtacctttgtaacctgctggcgactctttactgataagtgagggcaggagggcttccatcaaattaaacgccacaaagaaaagctgcacgccgaccaccagttgccagaactgcgtttgcgcgttccacaacacaatttccgcaaccacgatcaacccgacgcagaagacaaagacttgcttcattttgcgcttaacttcagcgtagataatgaaaggcacgaccgagccaaaggcgattagcattgtcgccagatagaccttccagtgttcagccgccgggaaccctgcatcagccagttgtccgggcagggcaacaaacgtcgacatcagcaaaatatgcagacacataatgccaaagttgagtttcagcagccgcggttccgccagcactttactgaaactgcctttcaccattccggactcacgattaagtacgtgagtgctactgttgggcacaacccaaatggtcaacgcaatgccggtcgttgccagaatagcgatcatccagaacagcgcgtgcagcccaagtttgtgagtgatgatcgggccaagcaccatcgcaatggcaaaggtaatgccaaagctcacgccgataaacgccatcgctttggtgcggttttgttcgcgcgtgagatcggaaagcagcgccataacggcggcggcaattgctccagagccttgtagcgcccggcccagaataattccccagatggagtcggaaagcgcagcgataacgctaccggcggcaaacaccgccagcccaccgacaattaatggtttgcgaccaatgcggtcggaaagcaggccaaacggaatctgaaaaacggcctgagtcagaccataaataccaatggcaataccgattaatgcttcgctggcaccttgcagagccatgccgtacgtggtcagaaccggcagaaccataaacatgcccagcatgcgcaacgagaatacggtcccttattattaattccaggtcgcgcgcctctcacctggcgtcattttataatcgttcattaccacctctgttttaaattcgcgactagtgtaaagcggcaaacgaatggggtaaacatgcggattttttagtaaatatttcgagagggatatgtttctaatgctaagaaaaaaggtgccgtagcacctttttaatagagaggttttgttaccacacagcagccagcagcgtatgcgagtccggtaccataaaatcaacggacatcatcaccgagagggcagtgatggcgatgatagagaagccgaacagcttgcgcgcccagattctgtcatcagcaactttataaccgcgcagagccatacctaaccaccagacgctaaccgccgcggcgaccaccagatatttatacccagcgtaaccgccaagagagagcatcagcgtggcaacggcaaaggcgatgatatacagcgtgatgtgattcttcgccaccgaaatgccttttaccactggcaataccggaatgtttgccgcctggtaatccttaaagcggaaaatggcgatggcataggagtgaggcatctgccacaggctgaagatagccagcaggatcgctgcgccgctatcgaactcaccggttaccgcacagtagccgatcaccggcggcgcagcgccggagagcgaaccaatcaacgtgccgtagacagagtggcgtttcatgtacaggctataaacgccgacataaaccacaaagcccatcacccccagccagcaggccagcggattcgcgccaaaccacagcagcataaagccagcaatacccagcaacgtggcgtacaccagcgagacagcaggagagatcaggcctttcaccagcacccgattcttcgtcctttccatctttctgtcgatatccctgtcgatgtagttgttaaacacacaacccgacgccacaaccagtgacaccccaaccagcgtgtagataaacaggggataatcaatgctgccctttgaggccagcaggaatcccccaatcaccgagatcaggttgccaaagatgatgcctggtttcgttacttgcaggtattgcttaaacatcataaccgccgctcttagtgcatcatcatgttgtagttgaggttccacataatccagatggagcctacaaccaggatagcgatgattagcacggtgaagacaaacgccgtcatgttccagccttcatctgatttggtattcatgtgcaggaagcacaccagatgcaccagaacctgtaccactgccattgccaggattgttcccagaattacggccggagaggcagctcctgtcatcaccatccagaacggaatcaccgtcagaatgatcgacaggataaagcctgtcatgtaggtttttacgctgccatgggacgcgccgctgtgatcggtagaatgactcattacatcgcccccatcagataaacaacagtgaacacacagatccaaaccacatccaggaagtgccagaacaggctcaggcacatgatgcgggtacggttagtgctggtcaggccgcgacgggcgatttgcaccatcagcaccgccatccagataagaccagaagtgacgtgcagaccgtgcgtgccgaccagcgcaaagaacgctgacaggaagccgctgcgatccggacccatgccgttaacaatcaggtgatggaattcatagatttccatcccgataaatccggcaccaaacaaccaggtcaacgccagccaggagataacctggcttttgttgtttttgtacatggcgatagccgccatgccgtaggtgatggagctgaacaacagcaagaaagtttcaaccagaacgaacggcagttcgaaaatgtccttacctgtcgggccgcctgcggtgccgttcaccagaacggcataggtagcaaacaagatagagaacagaatgcagtcgctcatcaggtagatccaaaatccgaagattttggttccgcctgcatcgtggtgcccgtgttcgtgcgcgtgggcagtcgcgtgcgtcaaagtatcagttgccatttttcagccctgccttagtaatctcatcgaaatgctggttttccagtttttcgatttctgccaccggcacgtagtaatccacgtcctcgtcgaagcttttcacgatccaggtgatgatcatgcctgcgaagccaacaatcgccagccaccagatatgccagatcatggcgaaaccgaagatggtggagaaagctgcaatgacgatacctgcaccgctgtttttcggcatatgaatttcttcatagtggtcaggctttttatacgcttcgcctttctctttcatttcccagaatgcatcacgttcgtgaacgtgcggcactacggcaaagttatagaacggaggcggggaagaggttgcccactccagcgtacggccaccccacgggtcgccagtcaggtcacggttctggtcgcggtcgcgaatagaaacgtacatctgaataacgaggcagagaatacccagcgcaatcagtactgcaccgctggctgcaatcatcagcatggtgtggaactgcgggtcaatctgctggctcaaacgacgggtcatgcccatgaagcccagcgcatacagtggcataaaggcaacgaagaagccgatgatccagaaccagaacgcgcgtttaccccaggtttcgttcagtttgaaaccgaacgctttaggccaccagtaggtcatccctgcgaagcagccgaagaccacgccgccgatgatcacgttatggaagtgcgcaatcaggaacaggctgttatgcagaacgaagtccgcgcccggtacggccagcagcacgccagtcatcccgcccaccgagaaggtgacgataaaaccgatggtccacagcatcgcagaatggaacacgatgcggccctgatacatggtgaacagccagttgaagatcttcaccccggtcgggatggcgataatcattgtggtgataccaaagaaggcgtttacgttcgcgcccgcacccatcgtaaagaagtggtgcagccaaacgatgaacgacagcacggtgatacagacggttgcccataccagcgaggtataaccaaacagacgtttacgcgagaaggttgccgcaatttcggagaacacaccgaaaacaggcaggatcaggatgtaaacttccgggtggccccaggcccaaatcaggttgatgtacatcatcatgttgccacccatatcgttggtaaagaaatgggtgcccagatagcgatccagggtcaacaacgcgacggtaaccgtcagaattgggaaggaagcaataatcagtacgttcgcgcacagtgatgcccaggtaaatactggcatcttgaacatggtcatgcccggtgcgcgcatcttcagaatggtaacgaagaagttgataccggtaagcgtcgtacctataccggatagctggagactccatatccagtaatcgacaccgactcccggactgtactctattcccgatagcggtggataggccagccagccggtctgcgcaaattcgcccacgccgagagaaacgttaaccagaatcacaccaacaacggtaaaccagaagcttaagttgttgaggaacgggaacgcaacgtcacgcgcgccgatctgcagcggaaccaccaggttcatcagaccgataacgaaaggcatcgccacgaagaagatcataatcacgccgtgcgcggtaaagatctgatcgtagtggtgaggtggcaggaagcccgcttcgcccgccgaggcaagagcctgctggctacgcatcataatggcgtcagcaaaaccacgcagcaacatcacaatcgccacgatgatatacatgataccgaggcgtttatggtcgacggaggtcagccactctttccacaggtaggtccacttaccgaagtaagtgatcaggccaacgagcgccagacctcccaaaataatgccagcgatcgtaaccatgacgataggttcatggaacgggactgcatcaagtgataattttccgaacatctttattcttcctcaacccctttaatgggcggattccgcgtggctcatgtccatgccttccataccttcgtgtgcgctgtgctcaccttctggctgggtcatgtccatgctcttaccgtgagccataaacttgttaattacatcggcaaacaagtctggtttcacgttggagaaatattccacctggttgtattcgctaggcgcggccagtttttcgaacgcagccatgtcagacatggtgttcggcgactgcttcgcttttgcgacccactggtcgaatgcggcgcgatccggtgttgcaatagctttgaacttcatgcctgagaagcccgggccgctgtagctggcggagataccgtcataagtgccgggttcgttggcgatcagatgcaggcgagtctgcataccggccatggcataaatctggctacccagacgcggaatgaagaaggagttcatcacggagttggaggtcactttgaagtacaccggagtgttcgccgggaaagcgatttcattcacggtagcaatgccctgttccgggtagatgaagaaccatttccagtccatggaaaccacttcgatggtaatgggcttctcgtcgtgtgccagcggcttgctaggctcaagagcgtgagtggttttccaggtcagtactgcaaggaagatgatgattaagataggtaccgtccagaccacagcttccactttattggagtgtgaccagttcgggctgtacttagcatctttattgctcgcacggtacttccaggcgaaaccaacagccatcaagattgcgggaataacgacaatcaacatcaggccaaatgccgtcagtatcagtgaacgttgctccagaccaatctgtcctttgggatctaacagcgcagaattacagccactgagcaatacagtgcctgcaaataatgacaaccatcccaaacttttattgtatttcctgagtctcatttaacgacctcaattccacgggatctggtggcgtttaaagtgtgtgggcattttacgggaaggttacattactgtaaacatgattaaattcctgttacttggatttggctgccaggtcacatatgttgcaaaacatatcaggttgattttaagaagctgttgcaaaagggcgttataacaaaaggggagtgctgaaggagtctgggcgggcaattggtataaccaatgtgaaataaaacaattatttaacaaataattatcattagagtgacaactgggtgatgagaaaataaagactcattagctgaatcgtgtaagaaaaatagaatttataaatggcgccaataatttccaaacgctaagccgcacaaaagaacaaatattaataagcgatactgatgtttatttagccgtaataattacggcgagtgattactacagctaaataatatttacagattacgtcagatgcgtttttcgtagcgccagataatccagcaaaccaccaagcacgacgccagaaagggcgactaaaaccccgacttccagcagagcaggcaggaaagagaagtgcgtcaaatccagcgcgtccatcgtcaatagcagtaaccacacggccaacaggctgacgcccgccgccagtgtccacatggcaaaggcataacctgccggatatgcggtacgggagataaagttgtcatttactcgtgtatattcaagcgtctggcggcaaaccagcagcaaaataagccctggtacggcagcggcgacggagaatagatagaatgtcgaccagccgtgtgcttcaacaaaccaacccgccacggggccgacataaactcgccctacagcagaaagcgctgagagcagggcaaattgagtagcggaaaatgacttattacatagcgtcattaacagcgcgacaaaggctgatgtgcccatcccgccacagaggttttcgaaaaagacggctgcgcccatgctgtagagatgcttatcagtaatcgacagcagccagtaaccggcgttagacgcaccttgtaaaatgccgaaaatcagcagtgcccggaacagtgacaggcgctgcatcaaaatcccaccgtacaatgcgccaacaatggtcgctagtaagccaagcgttttgttaaccacgcctacttcacccgcatcaaacccgacgccgcgaatcaaaaacgtggttgtcaggctcatggcgaatgcgtcgcccagcttatacagcacgataagaagcaaaataagccaggcattattgcgaccaaagaaatctcgcagaggtgcaacaaccgcttgttccagcgttttgggcacaggaatggtgtcggttggttctggtgcaagcaacgtcgcgataatacaggggatcaacagtgccgccattaaccagtacatgccctgccagcccagccatttatctgccagccacagggctaggccgccggaaaccagcatccctaaacggtaacccagcacgctgattgccgcgcccgcaccacgttcttctgccggaagcacatcggttttccacgcatcgaagactatatcctgggaagcagagcaaaaagcgatcaccactgccagcgccgccatccagcggagttgggtgcctggttcgagaaaacccatcgccgcaatggcgactaataacaggatttgcgtggcgagcagccaaccgcgccgccgcccaaaaaatggaggcgtgtagcggtccatcagcggtgaccagaggaatttaaaaacgtaagcctggcctaccagagagaagaaaccaatggttttgagatcgatattctcgaccgtcatccaggcctgtaaggtaccggatgtcagggcgagcggtagcccggaagcaaaacccaggatcagcaatatggctgaacgcggctgttgaaaaatacgtaaatattgactggacatgggcgtctacaggcccggcttgcaccgggccagagggcagaaattaacgcgcgttctgcttgatgaattcgtggatgctggtgtcctgagacatatcagcgatggtatcggtcagcacactgttaaccgcatcggcgatatttttgttggaggcctggaacgcaccttcaacgttgtagctggcacgatagtttttggtcattttgttgccattctgcgcggtagcgatgatggcgatatccgctttggtcgcgatgttgtagcgcacgttgccctgggacacgtcagcatacagttggctaacgatgatttgcagattaaccgggccattcggaccaaccatgtaaccacgcgcggtcatctgtttttccagcacttcttgcagcaggaaacgcagatcgcgggaggcggtcagggtaacgatttgattatcgcgggtgacttttgccagcgcctgatcggtacgctgatcggcaccattaatgcttacggtgacgcccatcaggcttggatcctgctgtggcagtgtaatcgtcggggaaacttcaatagttgttggcggttttgcgcatcctgcaagcataaacagagcaactaacgggaagaggatttttttgaacatgttcgggctctcagagactcttaagcgtgtttggtaaaaattcccgccatcataacattgccaacggcgaggggaagtgggtaaggcatgtaaattcatcatgttgacgaaataatcgcccctggtaaaagaaacactgatgcgaggcctgtgtttcaatctttaaatcagtaaacttcatacgcttgacggaaaaaccaggacgaaacctaaatatttgttgttaagctgcaatggaaacggtaaaagcggctagtatttaaagggatggatgacatctcagcgttgtcggaggagatatttcatgatgatacgtgagcggatagaagaaaaattaagggcggcgttccaacccgtattcctcgaagtagtggatgaaagctatcgtcacaatgtcccagccggctctgaaagccattttaaagttgtgctggtcagcgatcgttttacgggtgaacgttttctgaatcgtcatcgaatgatttacagtactttagcggaggaactctctactaccgttcatgcgctggctctgcatacttacactattaaggagtgggaagggttgcaggacaccgtctttgcctctcctccctgtcgtggagcaggaagcatcgcgtaaaaacgcatttgcaactgtcggcgcttttccagtatgttgctaaagattttatgaaaaacggcctgcgggccgttttgttttgtctggattttgcgctttttgcccagcattcagacgaaaattgcccgggaattgtgaaaaaatacgcgacagcgcgcaataaccgttctcgactcataaaagtgatgccgctataatgccgcgtcctatttgaatgctttcgggatgattctggtaacagggaatgtgattgattataagaacatcccggttccgcgaagccaacaacctgtgcttgcggggtaagagttgaccgagcactgtgattttttgaggtaacaagatgcaagtttcagttgaaaccactcaaggccttggccgccgtgtaacgattactatcgctgctgacagcatcgagaccgctgttaaaagcgagctggtcaacgttgcgaaaaaagtacgtattgacggcttccgcaaaggcaaagtgccaatgaatatcgttgctcagcgttatggcgcgtctgtacgccaggacgttctgggtgacctgatgagccgtaacttcattgacgccatcattaaagaaaaaatcaatccggctggcgcaccgacttatgttccgggcgaatacaagctgggtgaagacttcacttactctgtagagtttgaagtttatccggaagttgaactgcagggtctggaagcgatcgaagttgaaaaaccgatcgttgaagtgaccgacgctgacgttgacggcatgctggatactctgcgtaaacagcaggcgacctggaaagaaaaagacggcgctgttgaagcagaagaccgcgtaaccatcgacttcaccggttctgtagacggcgaagagttcgaaggcggtaaagcgtctgatttcgtactggcgatgggccagggtcgtatgatcccgggctttgaagacggtatcaaaggccacaaagctggcgaagagttcaccatcgacgtgaccttcccggaagaataccacgcagaaaacctgaaaggtaaagcagcgaaattcgctatcaacctgaagaaagttgaagagcgtgaactgccggaactgactgcagaattcatcaaacgtttcggcgttgaagatggttccgtagaaggtctgcgcgctgaagtgcgtaaaaacatggagcgcgagctgaagagcgccatccgtaaccgcgttaagtctcaggcgatcgaaggtctggtaaaagctaacgacatcgacgtaccggctgcgctgatcgacagcgaaatcgacgttctgcgtcgccaggctgcacagcgtttcggtggcaacgaaaaacaagctctggaactgccgcgcgaactgttcgaagaacaggctaaacgccgcgtagttgttggcctgctgctgggcgaagttatccgcaccaacgagctgaaagctgacgaagagcgcgtgaaaggcctgatcgaagagatggcttctgcgtacgaagatccgaaagaagttatcgagttctacagcaaaaacaaagaactgatggacaacatgcgcaatgttgctctggaagaacaggctgttgaagctgtactggcgaaagcgaaagtgactgaaaaagaaaccactttcaacgagctgatgaaccagcaggcgtaatttacgcagcataacgcgctaaattcgcacaaaggcccgtcaccgccaggtggtgggcttttttttgtcatgaattttgcatggaaccgtgcgaaaagcctctttcggtgttagcgtaacaacaaaagattgttatgcttgaaatatggtgatgccgtacccataacacagggactagctgataatccgtccataaggttacaatcggtacagcaggttttttcaattttatccaggagacggaaatgtcatacagcggcgaacgagataactttgcaccccatatggcgctggtgccgatggtcattgaacagacctcacgcggtgagcgctcttttgatatctattctcgtctacttaaggaacgcgtcatttttctgactggccaggttgaagaccacatggctaacctgattgtggcgcagatgctgttcctggaagcggaaaacccagaaaaagatatctatctgtacattaactccccaggcggggtgatcactgccgggatgtctatctatgacaccatgcagtttatcaagcctgatgtcagcaccatctgtatgggccaggcggcctcgatgggcgctttcttgctgaccgcaggggcaaaaggtaaacgtttttgcctgccgaattcgcgcgtgatgattcaccaaccgttgggcggctaccagggccaggcgaccgatatcgaaattcatgcccgtgaaattctgaaagttaaagggcgcatgaatgaacttatggcgcttcatacgggtcaatcattagaacagattgaacgtgataccgagcgcgatcgcttcctttccgcccctgaagcggtggaatacggtctggtcgattcgattctgacccatcgtaattgatgccagaggcgcaactgtgccgctatacttatccagggcggcacaacgctgtaagcggcttgcgcctgagaatggcatttgcgtcgtcgtgtgcggcacaaagaacaaagaagaggttttgacccatgacagataaacgcaaagatggctcaggcaaattgctgtattgctctttttgcggcaaaagccagcatgaagtgcgcaagctgattgccggtccatccgtgtatatctgcgacgaatgtgttgatttatgtaacgacatcattcgcgaagagattaaagaagttgcaccgcatcgtgaacgcagtgcgctaccgacgccgcatgaaattcgcaaccacctggacgattacgttatcggccaggaacaggcgaaaaaagtgctggcggtcgcggtatacaaccattacaaacgtctgcgcaacggcgataccagcaatggcgtcgagttgggcaaaagtaacattctgctgatcggtccgaccggttccggtaaaacgctgctggctgaaacgctggcgcgcctgctggatgttccgttcaccatggccgacgcgactacactgaccgaagccggttatgtgggtgaagacgttgaaaacatcattcagaagctgttgcagaaatgcgactacgatgtccagaaagcacagcgtggtattgtctacatcgatgaaatcgacaagatttctcgtaagtcagacaacccgtccattacccgagacgtttccggtgaaggcgtacagcaggcactgttgaaactgatcgaaggtacggtagctgctgttccaccgcaaggtgggcgtaaacatccgcagcaggaattcttgcaggttgatacctctaagatcctgtttatttgtggcggtgcgtttgccggtctggataaagtgatttcccaccgtgtagaaaccggctccggcattggttttggcgcgacggtaaaagcgaagtccgacaaagcaagcgaaggcgagctgctggcgcaggttgaaccggaagatctgatcaagtttggtcttatccctgagtttattggtcgtctgccggttgtcgcaacgttgaatgaactgagcgaagaagctctgattcagatcctcaaagagccgaaaaacgccctgaccaagcagtatcaggcgctgtttaatctggaaggcgtggatctggaattccgtgacgaggcgctggatgctatcgctaagaaagcgatggcgcgtaaaaccggtgcccgtggcctgcgttccatcgtagaagccgcactgctcgataccatgtacgatctgccgtccatggaagacgtcgaaaaagtggttatcgacgagtcggtaattgatggtcaaagcaaaccgttgctgatttatggcaagccggaagcgcaacaggcatctggtgaataattaaccattcccatacaattagttaaccaaaaaggggggattttatctcccctttaatttttcctctattctcggcgttgaatgtgggggaaacatccccatatactgacgtacatgttaatagatggcgtgaagcacagtcgtgtcatctgattacctggcggaaattaaactaagagagagctctatgaatcctgagcgttctgaacgcattgaaatccccgtattgccgctgcgcgatgtggtggtttatccgcacatggtcatccccttatttgtcgggcgggaaaaatctatccgttgtctggaagcggcgatggaccatgataaaaaaattatgctggtcgcgcagaaagaagcttcaacggatgagccgggtgtaaacgatcttttcaccgtcgggaccgtggcctctatattgcagatgctgaaactgcctgacggcaccgtcaaagtgctggtcgaggggttacagcgcgcgcgtatttctgcgctctctgacaatggcgaacacttttctgcgaaggcggagtatctggagtcgccgaccattgatgagcgggaacaggaagtgctggtgcgtactgcaatcagccagttcgaaggctacatcaagctgaacaaaaaaatcccaccagaagtgctgacgtcgctgaatagcatcgacgatccggcgcgtctggcggataccattgctgcacatatgccgctgaaactggctgacaaacagtctgttctggagatgtccgacgttaacgaacgtctggaatatctgatggcaatgatggaatcggaaatcgatctgctgcaggttgagaaacgcattcgcaaccgcgttaaaaagcagatggagaaatcccagcgtgagtactatctgaacgagcaaatgaaagctattcagaaagaactcggtgaaatggacgacgcgccggacgaaaacgaagccctgaagcgcaaaatcgacgcggcgaagatgccgaaagaggcaaaagagaaagcggaagcagagttgcagaagctgaaaatgatgtctccgatgtcggcagaagcgaccgtagtgcgtggttatatcgactggatggtacaggtgccgtggaatgcgcgtagcaaggtcaaaaaagacctgcgtcaggcgcaggaaatccttgataccgaccattatggtctggagcgcgtgaaagatcgaatccttgagtatcttgcggttcaaagccgtgtcaacaaaatcaagggaccgatcctctgcctggtagggccgccgggggtaggtaaaacctctcttggtcagtccattgccaaagccaccgggcgtaaatatgtccgtatggcgctgggcggcgtgcgtgatgaagcggaaatccgtggtcaccgccgtacttacatcggttctatgccgggtaaactgatccagaaaatggcgaaagtgggcgtgaaaaacccgctgttcctgctcgatgagatcgacaaaatgtcttctgacatgcgtggcgatccggcctctgcactgcttgaagtgctggatccagagcagaacgtagcgttcagcgaccactacctggaagtggattacgatctcagcgacgtgatgtttgtcgcgacgtcgaactccatgaacattccggcaccgctgctggatcgtatggaagtgattcgcctctccggttataccgaagatgaaaaactgaacatcgccaaacgtcacctgctgccgaagcagattgaacgtaatgcactgaaaaaaggtgagctgaccgtcgacgatagcgccattatcggcattattcgttactacacccgtgaggcgggcgtgcgtggtctggagcgtgaaatctccaaactgtgtcgcaaagcggttaagcagttactgctcgataagtcattaaaacatatcgaaattaacggcgataacctgcatgactatctcggtgttcagcgtttcgactatggtcgcgcggataacgaaaaccgtgtcggtcaggtaaccggtctggcgtggacggaagtgggcggtgacttgctgaccattgaaaccgcatgtgttccgggtaaaggcaaactgacctataccggttcgctcggcgaagtgatgcaggagtccattcaggcggcgttaacggtggttcgtgcgcgtgcggaaaaactggggatcaaccctgatttttacgaaaaacgtgacatccacgtccacgtaccggaaggtgcgacgccgaaagatggtccgagtgccggtattgctatgtgcaccgcgctggtttcttgcctgaccggtaacccggttcgtgccgatgtggcaatgaccggtgagatcactctgcgtggtcaggtactgccgatcggtggtttgaaagaaaaactcctggcagcgcatcgcggcgggattaaaacagtgctaattccgttcgaaaataaacgcgatctggaagagattcctgacaacgtaattgccgatctggacattcatcctgtgaagcgcattgaggaagttctgactctggcgctgcaaaatgaaccgtctggtatgcaggttgtgactgcaaaatagtgacctcgcgcaaaatgcactaataaaaacagggctggcaggctaattcgggcttgccagcctttttttgtctcgctaagttagatggcggatcgggcttgcccttattaaggggtgttgtaaggggatggctggcctgatataactgctgcgcgttcgtaccttgaaggattcaagtgcgatataaattataaagaggaagagaagagtgaataaatctcaattgatcgacaagattgctgcaggggctgatatctctaaagctgcggctggccgtgcgttagatgctattattgcttccgtaactgaatctctgaaagaaggggatgatgtagcactggtaggttttggtacttttgccgttaaagagcgtgctgcccgtactggccgcaacccgcagaccggtaaagagatcaccatcgctgctgctaaagtaccgagcttccgtgcaggtaaagcactgaaagacgcggtaaactaagcgttgtccccagtggggatgtgacgaagttcaagggcgcatctactgatgtgccttttttatttgtattcggtgactttctgcgtcttgtgggctgacaattgcccccgtttcttgtcacaataggcctttgcgcgcatcgatacgttgcgtgaggtacacagtcatctacagcggagtgttgttacaccatgatggacagcttacgcacggctgcaaacagtctcgtgctcaagattattttcggtatcattatcgtgtcgttcatattgaccggcgtgagtggttacctgattggcggaggcaataactacgccgcaaaagtgaatgaccaggaaatcagccgtgggcaattcgagaacgccttcaacagcgagcgtaatcgcatgcagcaacagctgggcgatcaatactccgagctggcagcgaacgaaggctatatgaaaaccctgcgtcaacaggtgctgaatcgtctgatcgacgaggcgctgctggatcagtacgcacgtgagctgaaactgggtatcagcgatgagcaggttaaacaggcgattttcgcgaccccagccttccaggttgacggcaaatttgataacagccgctataacggtatcctcaaccagatggggatgaccgccgatcagtacgcccaggcgctgcgtaaccagctcactacccaacagctgattaacggcgttgccggtaccgattttatgctgaaaggtgaaaccgacgagctggcggcactggtcgcgcaacaacgcgtggtgcgtgaggcgactatcgatgttaacgcgctggcggcgaagcagcctgtgaccgaacaggagattgccagctactacgaacaaaacaaaaacaatttcatgacgccggaacaattccgcgtgagttacatcaagctggatgccgcaacgatgcagcaaccggttagcgatgcggatatccagagctactacgaccagcatcaggatcaattcacccagccgcagcgtacccgctacagcatcatccagaccaaaactgaagatgaagcgaaagcggtacttgatgagctgaataaaggcggtgattttgctgcattagccaaagaaaaatctgccgatattatctctgctcgtaacggcggcgatatgggttggttagaagatgccactatcccggacgaactgaaaaatgctggtctgaaagaaaaaggccaactgtctggtgtcatcaaatcttcggtcggtttcctgattgtacgtctggacgacattcagccagcgaaagtgaaatcgttagacgaagtacgtgacgacattgcggcgaaagtgaaacacgaaaaagccctcgatgcgtactacgcgctgcagcagaaagtgagcgatgcggcaagcaacgacaccgagtctctggccggtgcagagcaagctgccggcgttaaagccactcagacgggttggttcagcaaagataacctgccggaagagttgaacttcaagccggttgccgacgctatctttaacggcggtctggtaggtgaaaacggcgcgccgggcatcaactctgacatcatcaccgtagacggcgaccgcgcattcgtgctgcgcatcagcgagcacaaaccggaagcggtgaaaccgttggcagatgttcaggaacaagttaaggcattggttcagcacaacaaagctgaacaacaggcgaaagtggatgctgagaaactgctggttgatttgaaagccggcaaaggtgcggaagctatgcaggctgccggtctgaaatttggcgagccgaaaaccttaagccgttccggtcgtgacccgattagccaggcggcgtttgcactgccactgccagcgaaagacaaaccgagctacggtatggcgaccgatatgcaaggtaatgtggttctgctggcgctggatgaagtgaaacaaggttcaatgccggaagatcagaaaaaagcgatggtgcagggtatcacccagaacaacgcacaaatcgtctttgaagctctgatgagtaacctgcgtaaagaggcgaaaatcaaaattggcgatgcgctggaacagcaataatcctgaagccgcctcgcaaaaaaatgcgttgcagctgtaacaagaaaaggtcgctttcgcggccttttccatttctgaacattgccatttgtttactgttttcactgccgttaaggtgattccactgttaacaaacaaggagaaaacagtatgaaacacggaattaaagcactgctcattaccctgtccctggcctgtgccggaatgtctcatagcgcgctggcggcagcttctgtggcgaaaccgacggcggtagaaaccaaagcggaagctcctgcagcacaaagtaaagcagcagtaccggcgaaagccagtgacgaagaaggcacccgggtcagcattaataatgccagcgcggaagagctagcccgcgcgatgaatggcgttggcctgaagaaagcgcaggcgattgtcagttatcgcgaagagtacggtccgtttaaaactgtggaggatctaaagcaggtgccggggatgggcaattcgctggtggaacgtaatctggcggtattaaccctgtaattaatttgcatagtggcaattttttgccagactgaagaggtcataccagttatgacctctgtacttataacaacaacgtaaggttattgcgctatgcaaacacaaatcaaagttcgtggatatcatctcgacgtttaccagcacgtcaacaacgcccgctaccttgaatttctcgaagaagcccgctgggatgggttggaaaatagcgacagttttcagtggatgacggcccataacatcgccttcgtcgtggtcaatatcaatattaactatcgtcgcccagcggtattaagtgacctgttaactattaccagtcagttgcagcaattaaacggtaaaagcggcatcttaagccaggtcattacactggagccggaagggcaggtggtagcggatgcgcttattacgtttgtttgtattgatcttaaaacgcagaaagcattagctctggaaggggaattgcgcgaaaagctggagcagatggttaagtaaacgttttgtggtgccggatgctcaagccgcatccggcgacacccggaataattacctcaacccggttttctgcttcatcgctgccatcaccgtcggtttatcggccagataatgattcaaaccgttggcgcgtaaattacatgccgcacaatgaccgcaaccgtcgcctttaaagccgttatagcaggtcaacgtttcgttacggactaaatccagtttgccgtaataatctgccagcgcccaggtttccgctttatcaatccacatcagcggcgtttcaaaacgaatatctttcgccatgcccaaactgacggcatggtttagtgctttcacaaactcatcgcggcaatccgggtagccggagaaatccgtttcgcagacgccagtaattacggcttctgcttttacctgatacgcatatattgccgccagcgtcaggaacaaaatattacgccctgggacaaacgtattcgggataccatcggcttcaggttcataatcaggcaccggaatgctgtcacgcgtcaggctactgaccgccagctcgttgagcagggtgacatccagcaccttatgcgcgcgtgcccccagtttcagcgccagttcgcgtgccacgtcgatttctgcgcgatgccgctgaccgtaatcgaacgtcacgcaatggacttcatcatattgttgtaatgcctgcaccagacaggtggtggaatcctgacctccactgaacacaacgacagcacgtttcatagataatcctgcttgaacaataaaagcgttatggtaacgcctgcgattaacccggaccagctattcattgcgatggcgcgggaagccaggcttcggtaaattcaaaccagccgcgcggtgtcagtcgcacaccgttcacgccgggaggggcactaatgcgatagtgatagttgaacagcggcgtcagcgtcgcatctgtcattaactggctaaaaaccgctttcagggcattaaatcggttttcttcatcaggcattatttgcacggcatccagtgtcgattgtagatgtgcgtatgctggagcgtcgaaaacatgtggccacagcggatcgcagcgcagccattgctccagagtatattccggtgcttcgccaattaatctgtcgcccatcatgaggtctgcgtgtgcctgtagggtcgtgtcgtcccagttttttgcgttatgaaaaataattgtgagttcacagccttccgctgccagtgtcgcctgtaggcgttctgccatggtatgaagttctatcggtaggtgataaaccagcgtcaaggttttcggtagtttgacttcatccggtacctgccaatgcggaatagtccagcctggcagtaatgcatgactggcggtgatcaggttttctccgacttctaacgtttgtaataaaccggattgatgaataatggagatcacttttcgcgcctgccagagggagagtcggggacttttgcgcaacgtcaaatagcaaaaacctaaactgatgccgctactgacctggctgacccgttgcagctcctccggtttgccgatggtgatttgcacgggatgccgacaactggttcccaaatctttttcgaaaagcggcggagttatccagtactcaaccgctttaagcagcggatgacgtaaatggtaataatcatggctttccaggcgcaccagctctgctgtgaattgtgttaagcgaaaaggacccgtgccgatcagtgggaattgcggatgcgccagatggctgcaatagctcgccagccggtgcgcaagccagtaatcagggcgatgtaaaaagaaggtcagacactgcggatgggtgacttcaatacgcttcacgctaataaataattgatccagtgctggcagttgtaacagcatcaataatcgctggtgtaagtgtgaggcttttactgcatcgccgttatgccagtgtagggttgaacgaagataaaagtcccagcgtaacccgtcagtagaggtttcccagtgatgcgctaaatcgccaatcgggcgctgagtattattatcgaagcgggtcaggccggaaaatatctgcccggcgagatgctgctcggcacggccgggcaaaaagcctggttgtagcggttcgagcgggcgatagtagggaatacgcaacgtgggtgtatcgttttgccattgtccgcccataaacggctgtaacagagtgcgcagctcacctggggccagttgcgccagctccagcacatcttgctgctttccggtttccagtgcctgttccatcatcgcattgcgtagcgattccggcgtgaccagaaagcgtaattgtccgcgctttccgcgtcctgactgcgcctgccactccagccatcccgcctcctgtgcctgacgcaacagcgtacgaacatggcgttcgctgcaaaaacagcgttcggccagttcgctgacggtgacggtttgcggctttccggcggaaggttgccacagacgttgatactggttaagacggttgagcaatcgcatataaacccggaacaatattatttaactattcactattacttccgtatatatcaggtgatactcaatcaccattaaccgtgtcacagagtggagaaagaaatggctcgtctggcagcatttgatatggatggcactttattgatgcccgaccatcatttaggtgagaaaaccctctctactttggcgcgactgcgtgaacgcgacattaccctcacttttgccacggggcgtcatgcgctggagatgcagcatattctcggggcgctatcgctggatgcgtatttgattaccggcaacggaacgcgcgtgcattctctggaaggtgaacttttacatcgtgatgatttacctgcggatgtcgcggagctggtgctgtatcagcaatgggatacccgagccagcatgcatatcttcaatgacgacggttggtttaccgggaaagagatccctgcgttgttgcaggcatttgtctatagcggttttcgttatcagataatcgatgtcaaaaaaatgccactcggcagcgtcaccaagatctgcttctgtggcgatcacgacgatcttacacgcttgcagatccagctatacgaagcattaggcgagcgtgcacatttgtgtttttccgccacggattgcctcgaagtgctgccggtgggctgcaataaaggcgctgcattgacggtgctgacccaacatttaggtttatcgttgcgcgattgcatggcctttggtgatgcgatgaacgatcgcgaaatgttagtcagcgtcggtagcggatttattatgggcaatgcgatgccgcaactgcgcgcggagctcccgcatttaccggtgattggacattgccgaaatcaggctgtctctcactatttgacgcactggctggactatccacatctaccttattcccccgaataacgagatcccttccagcaccgggcaattgcccggttttttttgcgttgaatttgtcattttgtgccgtggtgtttaaaccgcacagaataaattgtcgtgatttcacctttaaaataaaattaaaagagaaaaaaattctctgtggaagggctatgttagataaaattgaccgtaagctgctggccttactgcagcaggattgcaccctctctttgcaggcactggctgaagccgttaatctgacaaccaccccttgctggaagcgcctgaaacggctggaggacgacggtatccttatcggcaaagtcgccctgctggatccggaaaaaataggcctcggcctgaccgcttttgtgctgataaaaacgcaacatcacagcagcgaatggtattgccgctttgtcacggtggttaccgaaatgccagaagtgctggggttctggcgcatggctggtgaatacgattatctgatgcgcgtccaggttgccgacatgaaacgctacgacgagttttataagcgtctggtaaacagcgtgccggggctgtcggacgtcacttccagcttcgcgatggaacagattaaatacaccacttctttacccatcgaataaatatccagaatcaggtcaggacacaacgcgtgcgattatttgctcaattaagctggtatttccgtcgggaatggcgtcgctatctcggggctgtcaattaataataattgcttgtcattatcgcgatgctgcaactggttccgccaaaagtggttggtattgttgtcgatggcgtgacagaacaacactttactaccgggcagatcctgatgtggatcgccaccatggtgctgattgccgttgtggtttatctcctgcgttacgtctggcgggtattgctgtttggtgcgtcttatcaactggctgttgaactgcgtgaagattattaccgtcagctaagccggcagcatcctgagttttacctgcgtcatcgcaccggtgacctcatggctcgtgcgaccaatgacgtcgatcgcgtcgtgtttgccgccggagaaggggtgctgacgctggtggattcactggtgatgggctgcgctgtgttgattatgatgtctacgcaaattagctggcagttgaccttattttccctgttgccgatgccagtgatggcgatcatgattaagcgcaacggcgatgctttgcatgaacgctttaagctggcacaggcggcgttttccagtcttaatgaccgcacccaggaaagcctcaccagtatccgcatgatcaaagcctttggtctggaagatcgccagtcggcgttatttgccgcggatgccgaagataccggcaaaaaaaacatgcgggtggcgcgtattgatgctcgtttcgacccgaccatctatatcgcgattggtatggcgaacttgctggcgattggcggcggtagttggatggtggtgcagggcagtttaacgctgggccagctcaccagttttatgatgtatttaggtctgatgatttggccaatgctggcgctggcatggatgtttaacattgtggaacgtggtagtgctgcgtacagccgtattcgcgcgatgctggcggaagcgccggtggtgaacgatggtagcgaacccgtgccggaagggcgtggcgaactggatgtaaatattcaccagttcacgtatccgcagactgaccatcctgcgctggaaaacgtcaatttcgccctgaaacccggtcagatgctgggtatctgcgggccgactggttccggcaaaagtaccctgttgtcgctcattcagcgtcatttcgacgtcagcgagggggatattcgctttcatgatattcctctgacgaagttacaactcgatagctggcgtagccgcctggcggtagttagccagacgccattccttttttctgacactgtggcgaataacatcgcgctgggttgcccgaatgccacccagcaagagattgagcatgtcgcgcggttagccagcgtacatgacgatattttgcgtctaccgcaaggttacgatacagaggtgggcgagcgcggtgtgatgctttccggcgggcaaaaacagcgtatctccattgctcgtgcgttattagtcaacgcggaaatcctcatccttgatgatgcgctttcggcggtggacggacgcactgagcaccagatcctgcataacctgcgtcagtgggggcagggaagaacggtaatcatcagtgcccatcgcctttctgcactgacggaagccagtgaaattattgtgatgcagcacggacatatcgcccagcgtggcaatcatgatgtgctggcacaacaaagcggctggtatcgcgatatgtatcgctatcaacaactggaggcggcgctcgacgacgctccggaaaatcgcgaggaggccgtcgatgcgtagttttagccaactgtggccgactctcaagcgcctgttagcgtacggttcgccgtggcgtaaaaattaataataactggggattgcggtcctgatgatgtgggttgcggcggcggcagaagtcagtgggccgctgcttatcagctattttatcgacaatatggtagcgaaaaataacctgccgttgaaagtggttgcagggctggctgcggcgtatgttgggctgcaactgtttgccgccgggctacattacgcgcagtcgctgctgtttaatcgggcggcagtaggcgtagtgcaacagttgcgtaccgacgtgatggatgctgcgttacgccagccattaagcgagtttgatacccaacccgtcgggcaggtgatttcccgcgtcactaatgacactgaagtgatccgcgatctctacgttaccgtagtggcaactgtcctgcgcagtgccgcgctggtgggcgcgatgctggtggcgatgttcagcctcgactggcgaatggcactggtggcgataatgattttcccggtggtgctggtggtaatggtgatataccagcgttacagcacgccgattgtccgtcgtgtgcgcgcctatttggcggatatcaacgacggctttaacgaaatcatcaatggcatgagcgttatccagcagtttcgtcagcaggcgcgatttggcgaacgtatgggggaggccagtcgttcacactatatggcgaggatgcaaaccctgcgcctcgacggttttctgctgcgtccgctgctgagtctgttttcatcgctcattctttgtggcttgttgatgctgtttggcttctccgccagcggcaccattgaagtgggcgtgctgtatgcgtttatcagctatcttgggcgacttaacgaaccattaatcgaactgaccacgcaacaggcgatgctgcaacaggctgttgttgctggtgagcgcgtgtttgaactgatggacggaccgcgccagcaatatggcaatgatgatcgcccgttacagagtggcaccatcgaagtcgataacgtgtcatttgcttatcgcgatgacaatctggtgctaaagaacattaatctctctgtgccttcgcgcaattttgtggcgctggtcgggcataccggcagtggcaaaagcaccctcgccagtttattgatgggctattacccgctaacggaaggtgagattcgccttgatggtcgtccattaagttcgctaagtcacagcgcgctgcgccagggcgtggcaatggtgcagcaagatccggtggtgctggcggataccttcctcgccaacgtgacgctggggcgggatatctccgaagaacgcgtctggcaggcgctggaaaccgtgcaactggcggagctggcgcgtagcatgagcgacggtatttacacgccgctgggcgagcaggggaataatctctcagttgggcaaaagcaactgctggcactggcgcgcgtgctggtcgagacgccgcaaatcctgatccttgatgaggcaaccgccagcattgactccggtactgaacaggcgattcaacatgctctggcggcggtgcgtgaacataccacgctggtagtgattgctcaccgcttatcgaccattgttgatgccgacaccattctggtgcttcatcgtgggcaagccgtggagcagggcactcaccagcaactgctggcggcccagggacgctactggcagatgtatcaactgcaacttgcgggcgaagagctggcagccagcgtgcgtgaagaggaatcattgagcgcctgaatagcgcaatatttcatcgttggtgcaaaaatgtaacgcactgtgcactgtcatagtgcgttttcattttcaaacttcttaacttcctgctctctttctcgtttttcatttctggcacaccgcttgcaataccttcttcgtgtagcagaaccattaccgaattctgaccggaggggatctatgaagctggtgaccgtgataatcaaaccattcaagctggaagacgttcgtgaagcgttatcttccattggtattcagggcctgaccgtcaccgaagtgaaaggtttcgggcgtcagaaagggcatgccgagctgtaccggggggcggaatacagcgtcaatttcctgccaaaagtaaaaattgatgtggcgattgctgatgaccaactcgatgaagtgatcgatatcgtcagtaaggcggcttacaccggaaaaattggcgacggcaaaatcttcgtcgctgaattgcaacgcgtcattcgtattcgtaccggcgaagccgacgaagcggcgctgtaatctctggcacacagcaacaggaacgaaaaatgaagatagcgacgataaaaactgggcttgcttcactggcgatgcttccgggactggtaatggctgcacctgcggtggccgataaagccgacaatgcgtttatgatgatttgtactgcgctggtgctgtttatgactattccggggattgccctgttttacggtgggttgattcgcggcaaaaacgtgctgtcgatgctgacgcaggtgacggtgacatttgcactggtctgtattctctgggtggtttacggttactcgctggcgtttggtgagggcaacaacttcttcggcaacattaactggttgatgctgaaaaacatcgaactgacggcggtgatgggcagcatttatcagtatatccacgtggcgtttcagggatcgtttgcctgcattaccgtcggcttgatagttggggcgctggcggaacgaatccgcttctcagctgtgttgattttcgtggtggtatggctgacgctctcttacattccgattgcgcatatggtgtggggcggtggtttgctggcttctcacggtgcgctggatttcgcgggtggcaccgtggtgcacattaacgccgcaatcgccggtctggtgggcgcgtatctgataggaaaacgcgtgggcttcggtaaagaggcgtttaaaccgcacaacctgccgatggtcttcaccgggactgccattctctatatcggttggtttggctttaacgccgggtcagcgggcacggcgaatgaaatcgcggcactggcatttgtgaatactgtggtcgcaacggcggcggcaattcttggctggatcttcggtgaatgggcgctgcgtggtaagccttcactgctgggggcgtgttctggcgcgattgccggtctggtcggcgtgacgccagcctgcggctacattggggttggcggcgcgttgattatcggcgtggtagctggtctggcgggcttgtggggcgttaccatgctcaaacgcttgctgcgggtggatgatccctgcgatgtcttcggtgtgcacggcgtttgtggcattgtcggctgtatcatgaccgggatttttgccgccagctcgctgggcggcgtgggcttcgctgaaggtgtgacgatgggccatcagttgctggtacagctggaaagcatcgccattacgatcgtctggtccggtgttgtggcatttatcggctacaaattggcggatctgacggttggtctgcgtgtaccggaagagcaggagcgagaagggctggatgtcaacagccacggcgagaatgcctataacgcgtaacaagcactgcaaaaaacagccggacggttttcacctccggctatttttttaattgtgattacgcatcaccccttcctgaacggtcgaggcaaccagtacgccgtcttgggtataaaactcaccgcgcacaaagccacgtgcgctggacgccgaggtgctctccacgctatacagcagccattcattcaaattaaacgggcgatggaaccacatggaatggtcaatggtggcaatctgaatccccggttcgagaaaaccgatgccgtgcggctgtagagctaccggcaggaagttaagatcagaagcgtaaccgagcagatactgatgaacgcgcaggtcatccggcacgctaccatttgcgcggatccacacctgacgatgtggttctgcgacgtgacctttcagtgggttatgaaactccaccggacggacttccagcggacgatcgcagatgaatttatctttcagcactggcggcagcaggtgcgccagcgattgggcgatttgcgtttccgaagggaggccatcaggcgctggcgcggacggcattgttttttgatgttcgaaacccgcttctggtgcctggaaagaggcagtcatataaaaaatcggtttgccgttttgaatagcagcaacccggcgggcgctgaagctgttaccgtcacgcagcgtttcgacatcataaataatcggcttcttactatcgccagggcgaagaaagtagctgtgaaacgaatgtaccagccgctcttcagggacggtctcttttgcagcatacaaggcctgacccacgacctggccgccaaacacctggcgtaaacctaaatcttcactctggccgcgaaagagtccttcctcaattttttccagatttaacaatgtcagtaaattttttagcgcctgactcatataactctccagtaacaaagctgccgcagcaagccaaagtgagttgagtataacgcaaatttgctactggtccgatgggtgcaatggtctgaattacgggctaattacaggcagaaatgcgtgatgtgtgccacacttgttgacgttactattttgttaaccactcttccggcgaggaaagttagcccgctggtgcattgataataaggagaaatgaatgaaactcgtgcacatggccagtggtttagcggttgcgattgcgttggcggcttgcgcagataaaagcgcggatattcagacgccagcaccggctgcaaatacgtctatttcagcaacacaacaaccagctatccagcaaccgaatgtctccggtaccgtctggatccgtcagaaagtcgcactgccgcctgatgctgtgctgaccgtgacactttctgacgcgtcgttagccgatgcaccgtcaaaagtgctggcgcagaaagcggtgcgtactgaaggtaaacagtcaccattcagctttgttctgtcatttaacccggcagatgttcagccgaacgcgcgtattctgttgagtgcggcgattaccgtgaatgacaaactggtatttatcaccgataccgttcagccggtgatcaaccagggcggaactaaagccgacctgacattggtgccggtacagcaaaccgccgtgccggttcaggccagcggtggcgcaacgactaccgtaccttcgacttcaccaactcaggtgaatccgtcttcggcagttccagctcctacgcaatattaagcgacgttaaccctctccgcccggagagggttagtagttccagcgataacgctgcaagtcgatttgcccgcttcccgataccatcacaccttctgccagtaatgcctgtcgctgacgctgtaaatccggtccggttagcgaaattgtgccgtggcgattaaccacccggtgccagggtaaggtgctgccttcagggagacgctttaacacaccgcccacctggcgcgcggcgcggggcgatcccgccagtttcgccacatcaccgtaagtggtgacatagccttcgggaatagcggcgacgatttgccagacgcgttggggaaatgaatcttctttttccatcttttcttcctgaggtaatttttcagcataatctggaaaaacgcccgagtgaagtcgcattgcgcaagaaaccagcatctggcacgcgatgggttgcaattagccggggcagcagtgataatgcgcctgcgcgttggttctcaacgctctcaatgggggctctgttggttctcccgcaacgctactctgtttaccaggtcaggtccggaaggaagcagccaaggcagatgacgcgtgtgccgggatgtagctggcagggcccccacccatttctgcctcccaccgtttcgtcaaaaaatcccaacatggctaaactttaaccacaactgacgtcgcaagaattgtctggctgcgcagtacgcttcggaggtatgtctgatgaagtatgttgatggttttgtggttgccgttcctgccgataaaaaggatgcctatcgggaaatggccgctaaggctgcgccattgtttaaagagtttggcgcgcttcgtattgtcgaatgctgggccagcgatgtaccggatggcaaagtgaccgattttcgtatggcggtgaaagcggaagagaatgaagaggttgtctttagctggattgaatacccttcaaaagaggtccgcgacgctgctaatcaaaagatgatgtcggacccacggatgaaagagttcggcgagtccatgccgtttgacggcaagcgaatgatctatggcggattcgagtcaatcatcgacgaataggtagcgtgacgggctgtgcggcgtgccgtcagcccaaaaattcacaaatgttgctcggcccagcgtaagaaatcttctttcggtaatgccttgctgtagagccagccctgaccgtagtgcacgccatgctggcgtaaccactcttcttgtttactggtttcgattccctccgctaccattttcagtttcagtgtttttgccatttcgatgatatgcggcgtgacatttttatattccagcgcatcaacgaaagatttatcgatcttcagaatgtcgacatccagatcctgtaaataacttaaacttgaataccccgtaccaaaatcatcaagataaatttcatggcccgcctcccggtagcgagaaattatcggggcgctggttttcggatcggcaaactcgcgttcagtgagttcaagcgcgatctgtctgggattaacctgatagtgattgatcatgtcacgcagcaattgcgggattttttccgaggtgagcacgggggattcaagattgatcgaaatatgctgctgtggatgctgacgcagccagtcgcccatatcttcaaagacgcttcttataatcagtagcgtcaatggctcagaaaggcccgtttgctgtgccagcggaataaaactatctggtgacaaccaactaccgtctgtctgcggccagcgcgccagtgcctcagcaccgacaattttgccattggctaaggagacaatcggctgatagtgcacgcaaatatcacgattttcgatagcatcctgcagccgatgatgcggtgactgaatacggcgcaaaatacgcagcacaaacatcgctgccagcaggccaatcaccaacccgagcggtaaccaaataaagacttgccgatgccagcctttctgcaacattttcgttgaagcccatgtgatgatcgaaatattcatctccggtaagggcaggatatcgtaaatgattccattattttcgatatgctcaccgggtgttttttgtagcctggtaataattccctgagcaatttcatcgctgctggttatgacaacgttatgggcattgccaataatggcggcatcaatttgccatgagctatagggaatgacatcaataaaggaagcggggtcgatcatgacgacataatgtgccgttcccatggcgaccatgtaacggataatgcctaaatcgttatgcgatgttaaccagacacgataaccatctttcgaaattttacctggctcggggaaggtatcgggcggactttcatgctccagagacgaacactggggaacgttgttatcgatataagccacttcctgaatatagcgataactgtaagatacccgacgcatttccatgagatgggcttcgctacaggcagcgccttgccatctttccagctcctgcagcgcatctttcccttgtgtcgccaccttattggctcgaatagcgacgcgggaggaataggtatccagctcttcaataaacgatgtttctacctgctgatgggccagccagatgcttaagccgacaggcagcaatactgaaagaatcagtactcccgaaataaggccgaccagatgtcgtgttctcaccagcatatccttattaacacagtgtagggaaagtatatctgattgtggaaaaaggctggctggagataaggaggtagagctggtatttcatgaagtgatgggtggaaacgatcattgtcatttgaccaggcgcagagctttacgcctggtatgtaaccctaacttaagatgttgattcggcgcgagcgagggtaaaaatatcgtaaaaagacagttcacctttacggacgatcattttttgcagttgttccttatgaacatccgcgacacgcggagagttcaagatggcttcaaccagcgcggcaggtacaaagcgcgtgttgtaccattcgccgttatagcaaacgcggaaatccagcacgtcgatatcttcatagcggtagcgtgggtagacatcgaaaaagaagaaaccattaagcaggataaataatacaaccagtagccagacagagcctgacagcgtttcggactgcaacatcaccgccagggtggcaaaaaaagcaacgtacataccgataaacagccccggatgtttacggataaaactgatactaaagcggggtttgttgtcgcgtttttcgcgggtattcagagactcaatcgtttcggtcagcaggcgttgtatttcggtcatcgtttgccttcgtggtatctgcaactttccagggaacaccctattttaacgtgggaatagtagaggggaagtaacagatctaccacaattttgcataacagttgcgaaaaaccgattacaattttttaattattctggctggattaccgcccacgacaacgttgtccgggacatcttttgtgacaactgcacctgaggctaccacgacgttatcaccaatggtcacaccagggttaatgaccgcgcgtccgccaatccagacgttattaccgatggtgacgggtttccccagttcagcaccgctattacgtgctacagggtcgatgggatgtgttgccgtgtagatatgaacgcctggtgccaacatacagttatcaccgatgcgaatagggcagacatcaagcatcacgcaatcgaagttggcgaaaaaattattaccgagaaaaatgttatagccatagtcacagcgaaacgttggctcaatataagcctctgtcacctgaccgaatagatcagcgagaatttgctggcgtaatgtgtgctcttccgccagggaatgattgtatcggtgaataagctgacgagcgcgcaggcgatcgcgagataacgtctcatctgccgagcgatacaactcaccagcaatcatcttttctttttctgtgctcattactgacctccggttgctgaaaatgcggcaacacagtaagacgaaaagtcagtgaagagaacgttcccattacatctgtgtgataaagatcacatagggtatgtcttcatggcgaaaaagtataaaattcttaataaacagccggttatagctccgaaagcgaattatttattagcgaataaatttccatactgaggaagggatcttgtcgtacagtttattcatggtcaattcggcgaggcggtgatctgcggctgagtaaaataccgccagttcattatctgataattcgtatttatttttctcgataacacgctccagcgtgtcaattgtctggcaacgacgtaaacgcattaaataatcggttttcgttaaaggtttttcggacatacttctacctatggttgtaataattctaacaagataaactcgcaggattctctttcgtcgcattgacaaaacaacggaatagtcgattacctgacttccgccatttctgaagatcctgcatattaataccataactactgaacaacataaaggtgtcatccagatattcgtcgatctgctcaatgagcttattgtcttcattatacttaattttgtaattaagtgcgaaggtcgcaatatgctcaatcagttcattcaactggaggttgatcgccgaggttgggtcgtttacccagccatgattgctttcttcaaggtttgcaaggcagtcatgatacagggtttcacagagaaacttaagctgtgcgatatcatgtcttttgggtgagtattcatccataacgcgtccccttcttagcggttgaactaacggacacctttcgggatggaaaaaacttactgacctggacttgccctctcgtttgttagcttaactataagccactctttgcaggttttcatcgcattattacgaaaaattacaattaggaaggaagcgggacaggactcactttttcatactagcactaacccgcagcaggtaaaagcagtttgctcgaactattcataacatttcaggattatcgccagatgaaattggtgacactaataccaggattgctctgaatatgacgtaataaccgaggaatgaataaagaattaccgcaaataattaagaatagcctctaaatgattatggattattaaatctattagcgctacttaatataaattaactaacaatcagtattttttatgaattttatccgtggttaatactggttttcgtatgagatcctgagttggtggttcaattactccttaatgttcgtaggttatgcataaaaaaggccgcttacgcggccttagtgattacacgttgtatcaatgatgatcgacagtatggctgtgctcgatatcttcattcttgcggctaaagcggcggcgaaccaccacaaagaataccggaacgaagaagattgccagtaccgttgcggtcaccatcccgcccattacaccggtacctactgcgttctgcgcgccggaaccagcaccagtactgataaccagcggcataacgccgaggataaacgccagcgaggtcatcaggatcggacgtaaacgcatccgcaccgcatcaagcgtcgcttcaatcagacctttaccttctttatccatcaagtctttggcgaattcgacgataaggatcgcgttcttcgccgacaacccaatggttgtgagcaggcctacctggaagtaaacgtcattggtcaggccacggaaggtggcagccagcaacgcaccgataacccccagcggaacgaccagcataacggagaacggaatcgaccagctctcgtacagcgccgccagacacaggaacacgacaatcaacgaaatcgcgtacagtgaaggtgcctggttgccggagagacgttcctgataggacatccccgtccagtcatagccaacaccggtaggcagtttgctcgccagttgttccatcagctccattgcttcaccggtacttttacccggtgccgcctggcctaagatttccatggatggcaggccgttgtaacgttccagacgcggcgaaccgtactcccaacgagaagaggagaacgccgagaatggcaccatctgaccatcagcagcacgaacataccagtcgccgatatcatccggcagcatacggtatttcgcttctgacatgacataaactttcttcacacgaccgcggtcgataaagtcgttcacatagctgccgccccatgcagcgcccagagtggtgttaatgtcgttgatagaaacacccagcgcctgcgctttttcctggtcgatatcaatcttaaactgcggggtatcttccagaccgtttggacgtacgctggtcaacatatcagggtgcttcgctgcttctgcaagcaactggttacgcgcctgagtcagtttttcgtgaccaaggccagcctggtcaatcagctcaaagtcaaagccggttgcagtacccagttccacgattgcgggcaggttaaaggcgaaaaccatcgcatctttgatttgcgagaaagcgcgtgttgcacgcatggtaatcgcttcaactttgttttcttcgcccggacgatcggcccagtccttcaaggaaacgaacgcaataccggtattctgaccacgtcccgcaaagccgaagccgttaacggcgaacaccgactcaacgttgttcttttctttggtcagatagtaatgcgttacctcattgagcactttctgtgtacgttcctgcgttgcacctgctggcagctgaaccatggtcataaacacgccctggtcctcatctggcaagaaggagcttggcagacgcacgaacagataggccatgccgaccacgatgatcagatacagcaccaggtaacgccccgtactgcgcagaataccgcctacgctgtcggtgtagtggtgcgtgctcttctcgaacatgcggttaaaccagccgaagaagccttttttaccttccccgtgatcgcctttggcaatcggtttcagcatggtggcacaaagagctggagtcaggatcaacgccaccagtaccgacagcgccattgctgaaacaatggtaatagagaactgacgatagatagcaccagtagaaccgccaaagaaggccatcggtacgaataccgccgacagtaccatcgcgataccgaccagagcgccctgaatctgccccatcgacttacgggtagcttcttttggcggcaaaccttcttccgccataacacgctcaacgttttctaccacaacgatggcgtcatccaccaacaggccgatggcgagcaccatcccgaacattgttagcgtgtttatcgagaagccaaaggcggcaaggacggcaaaggtcccgagcaataccaccggtacggcaatggtcggaatcaacgtcgcgcggaagttctgcaggaacagatacataaccaggaacacgaggatgatcgcttcgaccagcgttttaaccacttcgtgaatagagattttcacgaacggcgtggtgtcgtatgggtaaacaattttcagacccgacgggaagaacggttccatcttcgccagttcagcacggattgccgcagcggtatccagcgcgtttgcaccggtcgccagcttgatccccagaccggaagccggttggccgttaaactctgcgatgatgtcgtagttctcaccacccagctcaatcttcgcgacgtcacgcagcagcacgcgggaaccatcctgattcactttcagcaggattttgccgaactcttcagtagaggtcagacgcgtctgagcaataatagaggcgttaagctgttggcctttcaccggcggcgtaccaccgagctgacccgccgcaacctgggcgttctgcgctttgatggcggtaatgacatcaaccggcgttagctggaatttgttcagctcattcgggttcatccagatacgcatcgcgtactgtgaaccgaacaactgaacatcacccacgcccgacgtacggctgatggcatctttcatattcgccgccacgtagtcggagatatcctcctgcgtcatggtgccatcggtgttgataacgccgacaaccatcaggaagctgctggatgatttctcaacgctcaccccttgctgctgaacttcttgcggcagcaacggcatcgccagctgcagtttgttctgcacctgaacctgcgcgatatccgcatcagtaccagactcaaaggtcagggtgatctgcacggtacccgtggagtcactgttagaggacatgtacatcaggttatcgataccgttcatattctgttcgataacctgtgtcaccgtgtcctgcactgttttcgcatcagcgccggggtaggaggcggagatcgttactgccggcggtgcaatcgtaggatattgcgccaccggcagtttgaggatcgcttattattaatttaacatgatgataatggcgatcacccacgcaaaaatcgggcgatcgataaagaaattaggcatgtcttaacggctcctgtttaagttaagacttggactgttcaggctgagcaccgcttgcggcttgctggttattatcagcggtaacttcttgtgcttttacctggacaccaggacgcactttctgcagcccacttattactacgcgatcgcctgctttcagaccttctgtcaccagccacttatcgccaatagcctggcttgcaacgatcggacgggtttccactttgtcatccgcgccaactaccagtacggtggcatcgccacgcggcgtacgggttacgccctgttgcgggactaaaatagcgtttggattaagcccttcttccagacgtgcgcgcacgaacatacccggcagcagagtgtgatccgggttcgggaagatagcgcgtagggtgatagacccagtggtctgatcaacggtaacgtcagagaattccagcgtaccgtcctgcgggaacttaatgccgtcactggtgatcagtgacactttggctttgccgttctcttgtttcagcgtgccattcgccagttcctgtttcaggcgcaggaagtcgttgctggactgggtcacatcaacgtagatcggatcaagttgctgcacggttgccagcgcagtcgcctgaccgttctgtaccaatgcgccttccgtcacgttcgacttaccaatgcgaccgctaatcggagaggtgactttggtgtaagccagattgatccgcgcagtttcaacggcagctttcgccgcagttaccgcagcattcgcctgttgcgcatcagccagagcctgatcgtactcttgcttactgatgtactgagtaccgagcagtttctgataacgattcaccgtcaattgcgcgatattggctgcagcctgggctttcgccagatcacctttcgcactgtcgtatgtcgcctgataggtcgcaggatcaatctgatagagagagacacctgcttcgatgtcgctaccttctttgaaattacgcttcaggataatcccgctaacttgaggacgaacttctgcgatccggtaggcactggtgcgacccggaagctcggttgtgatctgcagaggttcagttttgactgttactacgccaacggcgggcatctgctggccaccttgttgggcctgtttgtcgtcacatcctgttagggctaagctgcctgagagcatcagaacgaccgccagaggcgtaaaccctctgtttttgttcatatgtaaacctcgagtgtccgatttcaaattggtcaatggtcaaaagttaataaacccattgctgcgtttatattatcgtcgtgctatggtacatacattcacaaatgtatgtaaatctaacgcctgtaaattcacgaacatatggcacgaaaaaccaaacaagaagcgcaagaaacgcgccaacacatcctcgatgtggctctacgtcttttctcacagcagggggtatcatccacctcgctgggcgagattgcaaaagcagctggcgttacgcgcggtgcaatctactggcattttaaagacaagtcggatttgttcagtgagatctgggaactgtcagaatccaatattggtgaactagagcttgagtatcaggcaaaattccctggcgatccactctcagtattaagagagatattaattcatgttcttgaatccacggtgacagaagaacggcgtcgattattgatggagattatattccacaaatgcgaatttgtcggagaaatggctgttgtgcaacaggcacaacgtaatctctgtctggaaagttatgaccgtatagaacaaacgttaaaacattgtattgaagcgaaaatgttgcctgcggatttaatgacgcgtcgcgcagcaattattatgcgcggctatatttccggcctgatggaaaactggctctttgccccgcaatcttttgatcttaaaaaagaagcccgcgattacgttgccatcttactggagatgtatctcctgtgccccacgcttcgtaatcctgccactaacgaataaccctgaatctgactccaggatttttcctggacattttcgtcgttgctattctggttcactgcgtcgtgatattcttgcggtttgactttttcaggtcgttcttcaggttcagaaaccttcattcatcatgactatgttccagtattacaaacgatcacggcattttgttttttcagcatttattgcttttgtttttgtcttgttatgccagaacacggcgtttgcgcgggcgtcatcgaatggtgatctgccgacaaaagcggacctgcaggcgcaacttgactcactaaataaacaaaaagatctttctgctcaggacaaactggtgcagcaggatctgacagatacattagccaccctcgataaaatcgatcgcataaaagaagagacagttcagctacggcaaaaagtcgctgaagcgccggaaaaaatgcgccaggcgaccgcggcgttaacagcacttagcgatgtcgataacgacgaagaaacgcgcaaaattctgagcacgctgtcgttgcgccagctggaaactcgcgttgcccaggcgctggacgatttgcaaaacgcacaaaacgatctggcgtcttataacagccagctggtttcgttacagacgcagcccgaacgcgtgcaaaatgcgatgtataacgcttcgcagcagctgcaacaaattcgcagtcgtctggatgggactgatgtcggcgagacagccttacgtcccagccagaaagtgttaatgcaggcccagcaggcgttgctgaatgcggagattgaccagcagcgtaaaagcctggaagggaacaccgtcttgcaggataccttgcaaaagcaacgtgattacgtgacggcgaacagcgctcgtctggagcaccagttacaactgttgcaagaagcggtaaacagcaagcgcctgactttaaccgaaaaaacggcgcaggaagccgtctccccggatgaagccgcgcgtattcaggctaatccgctggtgaagcaggaactggaaattaaccagcagttaagtcagcgtctgattaccgcgactgaaaacggtaatcagttgatgcagcaaaacattaaagtcaaaaactggctggagcgggcgctgcaatcggaacgcaatattaaagagcagattgccgtcctgaagggcagcctgctgttgtctcgtatcctttaccagcaacaacaaacgctgccctcggcggatgaactggaaaacatgaccaaccgcatcgcggatttgcgtctcgaacagtttgaagttaaccagcagcgtgatgcactcttccagagcgatgcgttcgtcaacaaactggaagaaggtcacaccaacgaagtcaacagcgaagttcacgatgcgttattgcaagtggttgatatgcgtcgcgaattgctggatcaactcaacaaacagttgggtaaccagctgatgatggccattaacctgcaaatcaaccagcagcagttaatgagtgtgtcgaaaaacctgaaatccatcctgactcagcaaatcttttgggtgaacagtaaccgtccaatggactgggactggatcaaagcgttcccgcaaagcctgaaagatgaatttaagtcgatgaaaatcacggtgaactggcaaaaagcctggcccgccgtttttatcgctttcctcgctggtttgccgctgctgttgattgccgggctgatccactggcgtctgggctggctgaaagcgtatcaacaaaaactggcttccgctgtgggttccctgcgtaacgacagccagctcaacacaccaaaagcgatccttatcgacctgatccgtgcgctgccggtgtgcctgattattctcgcggttggcctgattctgttgaccatgcagctcaacatcagcgaactgctatggtcgttcagcaaaaaactggcgatattctggctggtgtttggcctgtgctggaaggtactggagaaaaacggcgttgccgtacgtcacttcggcatgccggaacagcagaccagccactggcgtcggcaaattgtccgcatcagtctcgcattgctgcctatccatttctggtctgtggtggcagaactttccccgctgcatctgatggatgatgtgctggggcaagcgatgattttcttcaacctgctgctgattgccttcctggtatggccgatgtgccgcgaaagctggcgtgataaagagtcgcacaccatgcgactggtcaccattaccgtgctgtcgataatcccgattgcgctgatggtgctgactgctacaggctacttctacactacgctgcgtctggcaggacgctggattgaaaccgtttatctggtgatcatctggaacctgctgtaccagacggtactgcgtggcttaagcgtagcggcgcggcgtatcgcctggcgtcgtgcgctggcgcgtcggcagaatctggtgaaagagggcgcagaaggtgctgaaccgccggaagaacccaccattgcactggagcaagttaaccagcagacgctgcgtattaccatgttgctgatgtttgcgctgttcggtgtcatgttctgggcaatttggtccgatttgatcaccgtgttcagctatctcgacagcatcacgctctggcattacaacggcactgaagctggcgctgcggtggtgaaaaacgtcaccatgggcagtctgttgtttgcgattatcgcctcaatggtggcctgggcgttgattcgcaacctgcctggtttactggaagtgctggtgctctcgcgactgaatatgcgccagggcgcgtcgtatgccattactaccatccttaactacatcattattgctgttggtgcgatgacggtgttcggatcgctgggcgtctcttgggataaactccagtggctggccgcagcattatccgtaggtcttggttttggtttacaagaaattttcggtaacttcgtctccggtttgatcattctattcgaacgtccggtgcgtattggcgatacggtaaccattggtagcttctcggggacggtaagtaagatccgtattcgtgcgacaacgattaccgatttcgatcgcaaagaagtgatcatcccgaacaaagcgtttgttaccgagcgtctgatcaactggtcgttgactgacactactacgcgtctggtgatccgtctcggcgtggcctatggctccgatctggaaaaagtgcgtaaagtgttactgaaggcggcgactgagcacccaagggtgatgcacgaaccaatgccggaagtcttctttacggcatttggtgccagcacgttggatcatgagctgcgtctgtatgtgcgtgaactgcgtgaccgtagtcgtactgtcgatgagctgaaccgtactatcgatcagctgtgccgtgaaaacgacatcaacattgcctttaaccagcttgaagtgcatctgcacaacgagaagggcgatgaggtgacggaagtaaaacgcgactacaaaggcgatgacccgacgccagcggtagggtaaaaacgaaagggggcaacatttagttgccccgagattgctaacaaagtgcgcgttgttcatgccggatgcggcgtgaccgccttatccggcctacgaaaccgcaagaattcaatatattgcaggagcggtgtaggcctgataagcgtagcgcatcaggcagttttgcgtttgcccgcaaccttaggggacatttagcgaccccatttatttctcacttttccgcctcatcatcgcgcgttaatttcttttcataatcacgctttacaatatccagcgcgcgcagcacggtactggcagggatctgattttcctccagcagcacaatcaaatcgacagccagtttgacatcgtcaggggcattttccagtgacatattctctccattgctagcgggttaaacgcgctaacctgttttcgattttttccagcgcatggcggcagcgtgccaggcgcgcttcataggcttccacttcacgatgcagcgtttgctgttccacgagatcggtcacccgcgccagacgggctctgcgttcggcaaccatctcacgtagccgccgctcaaaatcctgatgctgaatacgtttacgctgccagcgggcaattttcggtggtgcactgtcccactcgcgcaatgaccaggcggaggcttcacgcgcgatggcttccagttgtgccgccagatgttccgccagccaggccacttgcggcagctgttgctgctcaactgcatgacgaagcgcagccagattatcgcccgcctcgtcgagacaagcctgtagtgttgtcgcacgagtctgaaaaagatgcctgtcgaaacgagcacttagcgtggcgaactgtgacaccggggcacaacgctgacgcagcgtagcgagctgtccttccagtttttccagcagcagggcggttttcacgataagacctcaatgaaaatgataattgttatgctaaagtagccactctgtaagctgacaacactcaatatgcaacgaatcattttaatcatcattggctggctggcggtagtgctgggtacgctgggcgtggtattaccggtattaccgacgacgccgtttatcctgctggcggcctggtgctttgcccgttcttccccgcgctttcacgcctggttgctgtaccgctcatggtttggcagctatctacgtttctggcagaaacatcatgcgatgccgcgcggcgtcaaaccgcgggcgattttgcttattttgctcacgtttgccatttctctgtggttcgtccagatgccatgggtgcgcatcatgttgctggtaattctcgcctgtttgcttttctatatgtggcgaattccggtgattgatgaaaagcaagaaaagcactgaagcacaacaatcgcagttgcaattattgcgtacagccagtacattctggcgttttcgagcacaggcgcaggcggtcaaaggttaaacaactgttacttttgatacgtttaaaacgcgccgtgagtaccaccgtaacaagcaggcatacacttatgaccgcgactgcacagcagcttgagtatctcaaaaatagcatcaaaagcattcaggactacccaaaacccggcattcttttccgcgatgtcaccagcttactggaagacccgaaagcttacgctctcagcatcgacttgctggttgagcgttacaaaaatgcgggcattaccaaagttgtcggcaccgaagcgcgtggcttcttgtttggcgctccggtagctctgggtctgggcgttggctttgtaccggtccgtaaaccgggcaaactgccgcgtgaaaccatcagtgaaacttacgacctggaatacggcaccgatcagctggagatccacgttgatgccatcaaaccgggcgacaaagttctggtggtggacgacctgctggcaaccggcggcactatcgaagcgaccgttaaactgatccgtcgtctgggtggtgaagtggctgacgctgcgttcattatcaacctgttcgatctcggcggcgaacagcgtctcgaaaaacagggcattaccagctacagccttgtcccgttcccgggccattaattatcgccagtcttgtgctgcccacgctacggacagcacaagatgtgcattcagcctcgccgttctgacggggctgtgttagcattaccccttcgtgaatccaccttccagcgtttcagagcctgccaatgagttatcaggtcttagcccgaaaatggcgcccacaaacctttgctgacgtcgtcggccaggaacatgtgctgaccgcactggcgaacggcttgtcgttagggcgtattcatcatgcttatcttttttccggcacccgtggcgtcggaaaaacctctatcgcccgactgctggcgaaggggctaaactgcgaaaccggcattaccgcgacgccgtgcggcgtgtgcgataactgtcgtgaaatcgagcaggggcgctttgtcgatctgattgaaatcgacgccgcctcgcgcaccaaagttgaagatacccgcgacctgctggataacgtccagtacgctccggcgcgtggtcgtttcaaagtttatctgatcgacgaagtgcatatgctgtcgcgccacagctttaacgcactgttaaaaacccttgaagagccgccggagcacgttaagtttctgctggcgacgaccgatccacagaaattgccggtgacgattttgtcacgctgtctgcaatttcatctcaaggcgctggatgtcgagcaaattcgccatcagcttgagcacatcctcaacgaagaacatatcgctcacgagccgcgggcgctgcaattgctggcacgcgccgctgaaggcagcctgcgagatgccttaagtctgaccgaccaggcgattgccagcggtgacggccaggtttcaacccaggcggtcagtgcgatgctgggtacgcttgacgacgatcaggcgctgtcgctggttgaagcgatggtcgaggccaacggcgagcgcgtaatggcgctgattaatgaagccgctgcccgtggtatcgagtgggaagcgttgctggtggaaatgctcggcctgttgcatcgtattgcgatggtacaactttcgcctgctgcacttggcaacgacatggccgccatcgagctgcggatgcgtgaactggcgcgcaccataccgccgacggatattcagctttactatcagacgctgttgattggtcgcaaagaattaccgtatgcgccggaccgtcgcatgggcgttgagatgacgctgctgcgcgcgctggcattccatccgcgtatgccgctgcctgagccagaagtgccacgacagtcctttgcacccgtcgcgccaacggcagtaatgacgccaacccaggtgccgccgcaaccgcaatcagcgccgcagcaggcaccgactgtaccgctcccggaaaccaccagccaggtgctggcggcgcgccagcagttgcagcgcgtgcagggagcaaccaaagcaaaaaagagtgaaccggcagccgctacccgcgcgcggccggtgaataacgctgcgctggaaagactggcttcggtcaccgatcgcgttcaggcgcgtccggtgccatcggcgctggaaaaagcgccagccaaaaaagaagcgtatcgctggaaggcgaccactccggtgatgcagcaaaaagaagtggtcgccacgccgaaggcgctgaaaaaagcgctggaacatgaaaaaacgccggaactggcggcgaagctagcggcagaagccattgagcgcgacccgtgggcggcacaggtgagccaactttcgctaccaaaactggtcgaacaggtggcgttaaatgcctggaaagaggagagcgacaacgcagtatgtctgcatttgcgctcctctcagcggcatttgaacaaccgcggtgcacagcaaaaactggctgaagcgttgagcatgttaaaaggttcaacggttgaactgactatcgttgaagatgataatcccgcggtgcgtacgccgctggagtggcgtcaggcgatatacgaagaaaaacttgcgcaggcgcgcgagtccattattgcggataataatattcagaccctgcgtcggttcttcgatgcggagctggatgaagaaagtatccgccccatttgatcgtaagcacagcttacgttcgtcatccttaacgtgattgagagagaaacctatgtttggtaaaggcggtctgggtaacctgatgaagcaagcccagcagatgcaagaaaaaatgcagaaaatgcaggaagagatcgcgcagctggaagtcaccggcgaatctggcgcaggtctggtaaaagtgaccatcaacggtgcacacaactgccgtcgcgtagagatcgacccgagcctgctggaagacgacaaagagatgctggaagacctggtggctgcagcattcaacgacgcagcacgtcgtattgaagaaacgcagaaagaaaaaatggcctctgtatcctccggaatgcagctgccgcctggctttaagatgccgttctgatgcaaaccagcccgctgttaacacagcttatggaagcactgcgctgtctgccgggcgttggcccgaagtcggcgcagcgtatggcgttcacgctgcttcagcgcgatcgtagcggcgggatgcgtctggcgcaggcgctcacccgggcgatgtcggaaatcggccactgcgccgattgccgcactttcaccgaacaggaagtctgtaacatctgttcgaatccgcgtcgtcaggaaaacggtcaaatctgcgtggtggagagtccggcggacatctacgccattgagcagacggggcagttttcaggtcgttattttgtgttgatggggcatctgtcaccgctggacggcatcggtccggatgatatcgggcttgatcgtctggaacagcgtctggcagaggaaaaaatcactgaagtgatcctcgccaccaaccccacggttgaaggtgaagctaccgctaactacattgccgagctttgcgcgcaatatgacgtggaagccagccgaatcgctcatggcgttccggttggcggcgagctggaaatggtcgacggcaccacgttgtcacactcccttgccgggcgtcataagattcgtttttaagcaaacgagagcaggatcacctgctctcgcttgaaattattctcccttgtccccatctctcccacatcctgtttttaaccttaaaatggcattattgaggtagacctacatgaaaggacaagaaactcgtggttttcagtcagaagtgaaacagcttctgcacctgatgatccattctctctattccaataaagaaatcttcctgcgtgagcttatctctaacgcctccgatgcggcggacaagctgcgtttccgtgcgctctctaacccggacctgtacgaaggtgatggcgaactacgcgttcgtgtctctttcgataaagacaagcgtacgctgaccatctccgataacggcgtggggatgacccgcgacgaagtgattgaccatctggggactatcgctaaatccggtaccaaatcattcctcgaatccctgggttctgaccaggcgaaagacagccagctgatcggtcagtttggtgttggtttctactctgcgtttatcgtggccgacaaagtgaccgtgcgtactcgcgcggcaggcgaaaaaccagaaaatggcgtcttctgggaatcggctggcgaaggtgaatacaccgttgccgacatcaccaaagaagatcgtggtactgaaatcaccctgcatctgcgtgaaggcgaagacgagttcctcgatgactggcgcgtgcgttccatcatcagcaaatactccgaccatatcgcgctgccggtagagatcgaaaaacgcgaagagaaagacggcgaaaccgttatctcctgggagaaaatcaacaaagcgcaggcgctgtggactcgtaacaagtcggaaatcaccgatgaagagtacaaagagttctacaaacacatcgcccacgactttaatgatccgctgacctggagccacaaccgtgttgaaggtaagcaggagtacaccagcctgctgtacatcccgtcccaggctccgtgggatatgtggaaccgcgatcataaacacggcctgaaactgtatgttcagcgtgtgttcatcatggacgacgcagaacagttcatgccgaactatctgcgcttcgtgcgtggtctgattgactccagcgatctgccgctgaacgtttcccgtgaaatcctccaggacagcacggtaacgcgtaacctgcgcaatgcgctgaccaagcgtgtgctgcaaatgctggaaaaactggcgaaagacgacgcggaaaaataccagaccttctggcaacagtttggcctggtactgaaagaaggtccggcggaagatttcgctaaccaggaagcgatcgccaaactgctgcgttttgcttctacccataccgattcttctgcgcagaccgtatctctggaagactacgtttcccgcatgaaagaagggcaggagaaaatctactacatcaccgcagacagctatgcggcagcgaagagcagcccgcacctggaactgctgcgtaagaaaggcatcgaagttctgctgctttccgaccgcatcgatgagtggatgatgaactatctgactgagttcgacggtaaaccgttccagtcggtgtctaaagttgacgagtcgcttgaaaaactggctgacgaagttgatgagagcgcgaaagaagcggagaaagcactgactccgttcatcgaccgtgtgaaagccctgctcggcgagcgcgtgaaagatgtccgtctgactcaccgtctgaccgatacgccagcgatcgtttcgaccgacgcggacgaaatgagcactcagatggcgaaactgttcgctgcggcgggccagaaagtgccagaagtgaaatacatcttcgaactgaacccggatcacgtactggtgaaacgtgcggcagatactgaagatgaagcgaagttcagcgagtgggtagaactgctgctggatcaggcgctgctggcagaacgcggcacgctggaagatccgaacctgtttattcgtcgtatgaaccagctgctggtttcctgatgtaatgccggatgaccttcgtgtcatccggcatttttcttttcatcatctgcactttccgcaaattatctcgccattaaccgtttcagccccaggtgcctttcttgaggcaatcgcctgttggtggtatcgtttatcgctttttcaaaaaattcgacacattttaaggggattttcgcaatgcgtatcattctgcttggcgctccgggcgcggggaaagggactcaggctcagttcatcatggagaaatatggtattccgcaaatctccactggcgatatgctgcgtgctgcggtcaaatctggctccgagctgggtaaacaagcaaaagacattatggatgctggcaaactggtcaccgacgaactggtgatcgcgctggttaaagagcgcattgctcaggaagactgccgtaatggtttcctgttggacggcttcccgcgtaccattccgcaggcagacgcgatgaaagaagcgggcatcaatgttgattacgttctggaattcgacgtaccggacgaactgatcgttgaccgtatcgtcggtcgccgcgttcatgcgccgtctggtcgtgtttatcacgttaaattcaatccgccgaaagtagaaggcaaagacgacgttaccggtgaagaactgactacccgtaaagatgatcaggaagagaccgtacgtaaacgtctggttgaataccatcagatgacagcaccgctgatcggctactactccaaagaagcagaagcgggtaataccaaatacgcgaaagttgacggcaccaagccggttgctgaagttcgcgctgatctggaaaaaatcctcggctaattcgaaagcgcgcacggacagtcccctcgccccctcggggagagggttagggtgaggggaacaggcccgcacaagcaaacttatcagcaatctcaggccggatattcattcggccttttacaaaaacctcaatctgcgctattcctttttctgatttgacctctcacagcaattagttcttcttcctcacttttccgctacaattatcaacaagttgaatcgataagaggcggtaatgcgtcagactaaaaccggtatcctgctggcaaacctgggtacgcccgatgcccccacacctgaagcggtaaaacgctatctgaaacaatttttaagcgacagacgcgtggttgatacctcacggttgttatggtggccattgctgcgcggcgtgattttgccgctgcgctcgccgcgtgtggcgaagctgtatgcctctgtctggatggaaggtggctcgccgctgatggtttacagccgccagcaacagcaggcgctggcacaacgtttaccggagatgcccgtagcgctgggaatgagctacggctcgccatcactggaaagcgccgtagatgaactcctggcagagcatgtagatcatattgtggtgctgccgctttatccgcaattctcctgttctacggtcggtgcggtatgggatgaactggcacgcattctggcgcgcaaacgtagcattccggggatatcgtttatacgtgattacgccgataaccacgattacattaatgcactggcgaacagcgtacgcgcttcttttgccaaacatggcgaaccggatctgctactgctctcttatcatggcattccccagcgttatgcagatgaaggcgatgattacccgcaacgttgccgcacaacgactcgtgaactggcttccgcattggggatggcaccggaaaaagtgatgatgacctttcagtcgcgctttggtcgggaaccctggctgatgccttataccgacgaaacgctgaaaatgctcggagaaaaaggcgtaggtcatattcaggtgatgtgcccgggctttgctgcggattgtctggagacgctggaagagattgccgagcaaaaccgtgaggtcttcctcggtgccggcgggaaaaaatatgaatatattccggcgcttaatgccacgccggaacatatcgaaatgatggctaatcttgttgccgcgtatcgctaaagctgagcggtaaagaactgagcgccgtcgcgaagagcctcgtcggcggttttcatcatccgtgaataatgcaaaaaggcgtgcagcgtgcctgggtagagtttgaactcacagggctgctgatgcgccgctaacgtctggtaaagcagacggctgtcatccagcagcggatcgaactccgccccggcaataaaacagggcggaacttcgcgagtgagatcattattaaacagacagtaatacggcgactcgcggtccgcgtcgttgcttaaatatgcctcttcgtacatctgcaaatcctgttgcgttaagccatcccagacaccgcccaacagacgacgagtcacggaatcccgtaatccgtaaagcccataccacagcaaaacgcccgcaactttaccgcaatcgatctgtttatcacgcaaccacaacgcactggcgagcgccagcatggcacctgcggaatcaccggcaaagccaatgcgggacatattgatttgataatcctccgcctgctggtggaaataacaacaagcagccacaatttcctctatcgcttgcggaaaacgcgcttcaggtgaaagggtgtaatcaataccaatcaccgtacattggctgtagcttgccagcaggcgcatgatgcgatcgtgggtatcgagattgccgagaataaaaccgcctccatgcaaataaaatagcgtcgctgggctatctggctgcggacaaaagagacgtgtttccacctgcccatattttgttggaaccatgtaagctctggttgccatttctggagcgcccgcattccagaatcggcgctcaagcgtgtaatactgtcgttgctcagcaatcgttcccgttgcgggccagggcggtaaatccggctgaagagtattcacaacggtcttcatttcagcagaaataaggtccagaacaggtagtttgttttccggcttcatacaaaaactcctttcaaattacgtcattgtaaggaaccactgccatgaaaatgcgatcccgcctgctgatattgaaactggctgcgtctcgcgcgctcccgtcagattgtgttaacattcgccgctcagttaaccacccgtaaaaacaaccatgaaatttcccggtaaacgtaaatccaaacattacttccccgtaaacgcacgcgatccgctgcttcagcaattccagccagaaaacgaaaccagcgctgcctgggtagtgggtatcgatcaaacgctggtcgatattgaagcgaaagtggatgatgaatttattgagcgttatggattaagcgccgggcattcactggtgattgaggatgatgtagccgaagcgctttatcaggaactaaaacagaaaaacctgattacccatcagtttgcgggtggcaccattggtaacaccatgcacaactactcggtgctcgcggacgaccgttcggtgctgctgggcgtcatgtgcagcaatattgaaattggcagttatgcctatcgttacctgtgtaacacttccagccgtaccgatcttaactatctacaaggcgtggatggcccgattggtcgttgctttacgctgattggcgagtccggggaacgtacctttgctatcagtccaggccacatgaaccagctgcgggctgaaagcattccggaagatgtgattgccggagcctcggcactggttctcacctcatatctggtgcgttgcaagccgggtgaacccatgccggaagcaaccatgaaagccattgagtacgcgaagaaatataacgtaccggtggtgctgacgctgggcaccaagtttgtcattgccgagaatccgcagtggtggcagcaattcctcaaagatcacgtctctatccttgcgatgaacgaagatgaagccgaagcgttgaccggagaaagcgatccgttgttggcatctgacaaggcgctggactgggtagatctggtgctgtgcaccgccgggccaatcggcttgtatatggcgggctttaccgaagacgaagcgaaacgtaaaacccagcatccgctgctgccgggcgctatagcggaattcaaccagtatgagtttagccgcgccatgcgccacaaggattgccagaatccgctgcgtgtatattcgcacattgcgccgtacatgggcgggccggaaaaaatcatgaacactaatggagcgggggatggcgcattggcagcgttgctgcatgacattaccgccaacagctaccatcgtagcaacgtaccaaactccagcaaacataaattcacctggttaacttattcatcgttagcgcaggtgtgtaaatatgctaaccgtgtgagctatcaggtactgaaccagcattcacctcgtttaacgcgcggcttgccggagcgtgaagacagcctggaagagtcttactgggatcgttaagttatcgtcggttcgtaggccagataaggcgttcacgccgcatctggcatttggctctcgatgcctgatgcgacgctggcgcgtcttatcatgcctacatatttttcatattttacatccggcaaccaccgtttaccccgtcaccacctcacccgccggtggcgtttccagcagttccagcatggtacgggcgatttcacgctcgcccatcactacctgattcgcaccacgttcggtgatatacgccacttcatcgtcataatgggcgcgggcaataatctcaatatccggatttttcgcgcgggcagatgccacaatctcacccgcttcataaccgttgggaatcgtcaggatcagccattttgcacattccagatgcgccagttgcataatttcttcgttcgccgcattgcccaatactgcgcggaccccgcgctctcgcagctcatcaacacgggttcgtgacgtctcaatcaccaccagcggaatatcagaggcgagcaatttctcccccagcaggctgcctacacgaccgtaacccaccagtagcgcatggttgcaaatatccactgggatctgcttctcttcttcgattgcctcttccagcgtctgctcttccagcgtttcggtcttcgccagatatttctccagtagtgcgaacagtaccgggttgagcataatcgacaggatcgcccctgccagtaccaggttttgtccggcctgcggcagtaaattcaatgccattcccagtcccgccaggataaacgcgaactcaccaatctgcgccaggctggcggcgatggttaatgccgtacgttgggagtgaccaaacagtcgcaccaggaaaaatgcggctaacgacttaccaaacagaataatcgccagcgtcgccagcactgccagcggttgctgaatcagaattaacggatcaaacaacatcccgacggagacaaaaaacagcaccgcaaacgcgtcgcgcaatggcagcgtatcgtgggcggcacggtgactcagttcagactcgttcagtaccatcccggcaaagaacgcaccgagtgcaaaggagacatcaaacagctctaccgcaccaaaggcaacccctaacgccagcgccagcaccgacagggtaaacagctcgcgagaaccggttgccgcgctgcgtgccataatccacggcaccagacggcgacctaccagcatcataatggcgataaatgcgatcactttgccgatggtgatccccatatcgactgcaagagtggcaaagcccacatcgccctgttccatcattcctgccactgcgggcagcaacaccagcgtcagaaccattaccaggtcttccacaatcaaccaaccgatggcgatttgcccacgctgactgtcaattaattgccgttcttcaagtgcgcgcagtaacaccacggtactggcggtggaaagacataaaccgaacacgataccggtcattaacgaccagcccagcacggcagagagcgccatacccagcagcgtcgccacggctatctgggcgatcgcaccgggaatggcgatggcctttaccgccatcaaatccttcagcgaaaagtgcaaaccgacgccaaacatcaacagaatgacgcccagttcagccagttccggggcaagcttggtatcggcaacaaagcccggagtgaatggtcctgccagcacacccgctaacagatatcccaccagaggagaaatacgtagtttattggccagcatgccgaggataaaggcgagcacaaggccgccaacaatggtggtgataagcggggtggcgtgatgcattccgtctccttttcctggtggttattgtccatttttggccgggaaaaccaaaattacaggtaatagtttatgacaatttcattgatgatgttcatgaataattattgaattttgcagaaaaatggaattagctgcaaaaaaagcacggatcggaaaacagaaggcggtttaacagaggaaaggcttatggtgactgtaaaacgatgcagccaaagtttgcctttggctgcaatgaaatcagtctttatgccggttatcaggcaggaatatggtcaacatccccaatagtggcaggaaagcacagattttatagactaactcgatgctggtgtgatcggcgataagccccagaactgccgctcccagacctcccatgccaaaagcaaaaccgaaaaagagtccagaaaccataccgatacgtcctggaagcagctcctgagcgtagaccagaatggcagagaatgccgaagcgaggataaatccaataatcaccgttaaaacccccgtccagtgcaggctggcgtagggtaaaatcagcgtaaacggcgcaacgccgaggatagagccccaaatcacatatttccgcccaattttatcccctacaggcccgccgatcaccgtacctgccgcaacggcaaacaggaaggcaaacagatgaagctgagcattctggatagataatccgaatttttgcatcagataaaaggtgtaatagctgctgatgctcgccatatagaaatatttcgagaaaatgaggattaacagaatgctgaccgccagtacaactttattgcgcggcagtggattgataatcgtcgctttgggttttcctttattcattcggtgctgtgccgagtaccaacggctgatttgcgccaacaccacgatcgccagcagtgccgcaagcacaaaccaggcaacgttgcctttgccataaggcgcgataatcaccgccgccagcaagggtcccagggaactgccaaagttgccgccgacctgaaagatagattgcgccaggccatgccgcccgccggaagccatacgggccacgcgagaagattccggatgaaagaccgatgaaccggtaccgaccagcgccgccgccagcagaactgcgccaaaactgcccgccagcgcaagcagcaccagaccgcttaaggtaaagcacatgccaattggcaacgaccatggcatcggatatttatcggtccagtattattattaattgaccactggttgcagtagcgaagaggcgagctggaaggtgagggttatcatgccaatctgcataaatgtcagagaaaattctgactgaagcagcggataaatcgccagaatcagcgattggatcatgtcgttcagcagatgtgagaggctgatagcacctaaaataccaaacgatgttcgggccttggtcgttgacgcagccgcgcccgccacaggctggggttgttcactcattgccataggaaagtcactttttcagggttgcgatgtaaagaatgatcttatttgtgattattaccagactaacatacctgtatgcgtcgtctgaaggaagtctcaacgccgaatacagaatttctaatctggatgcagatttatcttcaccggacgcagacttgtctatgatgtcgcgtcatactatttttcaacacgttgaaatcaggtcagggagagaagtatgaaattattgcagcggggcgtggcgttagcgctgttaaccacatttacactggcgagtgaaactgctctggcgtatgagcaggataaaacctacaaaattacagttctgcataccaatgatcatcatgggcatttttggcgcaatgaatatggcgaatatggtctggcggcgcaaaaaacgctggtggatggtatccgcaaagaggttgcggctgaaggcggtagcgtgctgctactttccggtggcgacattaacactggcgtgcccgagtctgacttacaggatgccgaacctgattttcgcggtatgaatctggtgggctatgacgcgatggcgatcggtaatcatgaatttgataatccgctcaccgtattacgccagcaggaaaagtgggccaagttcccgttgctttccgcgaatatctaccagaaaagtactggcgagcgcctgtttaaaccgtgggcgctgtttaagcgtcaggatctgaaaattgccgttattgggctgacaaccgatgacacagcaaaaattggtaacccggaatacttcactgatatcgaatttcgtaagcccgccgatgaagcgaagctggtgattcaggagctgcaacagacagaaaagccagacattattatcgcggcgacccatatggggcattacgataatggtgagcacggctctaacgcaccgggcgatgtggagatggcacgcgcgctgcctgccggatcgctggcgatgatcgtcggtggtcactcgcaagatccggtctgcatggcggcagaaaacaaaaaacaggtcgattacgtgccgggtacgccatgcaaaccagatcaacaaaacggcatctggattgtgcaggcgcatgagtggggcaaatacgtgggacgggctgattttgagtttcgtaatggcgaaatgaaaatggttaactaccagctgattccggtgaacctgaagaagaaagtgacctgggaagacgggaaaagcgagcgcgtgctttacactcctgaaatcgctgaaaaccagcaaatgatctcgctgttatcaccgttccagaacaaaggcaaagcgcagctggaagtgaaaataggcgaaaccaatggtcgtctggaaggcgatcgtgacaaagtgcgttttgtacagaccaatatggggcggttgattctggcagcccaaatggatcgcactggtgccgactttgcggtgatgagcggaggcggaattcgtgattctatcgaagcaggcgatatcagctataaaaacgtgctgaaagtgcagccattcggcaatgtggtggtgtatgccgacatgaccggtaaagaggtgattgattacctgaccgccgtcgcgcagatgaagccagattcaggtgcctacccgcaatttgccaacgttagctttgtggcgaaagacggcaaactgaacgaccttaaaatcaaaggcgaaccggtcgatccggcgaaaacttaccgtatggcgacattaaacttcaatgccaccggcggtgatggatatccgcgccttgataacaaaccgggctatgtgaataccggctttattgatgccgaagtgctgaaagcgtatatccagaaaagctcgccgctggatgtgagtgtttatgaaccgaaaggtgaggtgagctggcagtaatccgaaagtgccggatgtttgcatccggcacaatgcttaatcgcggcgggcgatatcagcaaatttggcatcgaggatctttgccagatcgcctgccgccagttcgatatccagtccgcgcttgccgccggaaacataaatagtggcaaattcttgtgcgggggcgtcgataatcgttggcagacgttttttctgccccagtgggctaatccccccaaccaggtatcccgtcgaacgctgcgcgaccatcggatcggccatctcaactttcttggcacccagcgcttttgctacttttttaagatccagttgacctgcgaccggcgtaacggccacggcaaggtgtttcatatcaccgttcactgccaccagcagcgttttgtagacctgatccggattcaaacctaattttttgacgacttcatcgccaaaattggtttcagccggatcgtgctcgtaggtatggatttgaaacgaaatcttgtttttttcgagtaatttaactgcgggtgtcatggtaattttcctgccttaaacaaaaaaacgaagcaagcatacgcctgatggcggtccaaaaaaaagagtcatcttgcctaagagtattggcaggatggtgagattgagcgacaatcgagttacaccgtcgcttaaagtgacggcataataataaaaaaatgaaattcctctttgacgggccaatagcgatattggccatttttttagcgcaacatttgcggcaaattcccttctccatacaggtgtagtgcaccgaccgcgaccacatatcgccccggcggcatggcgcgtaatttatcccgccaggcgagatttcgctgatgcatcagcacatcgtacagcgactgactgaacgtattgggcagcgttatatcattattttgcggcggtgcattcagccaccagctcatcatttgttgcagcaaccgtgcgttggtatgccagtgggtcagcgtatcgtccagcagcgccagtcctttgtcagggagctggagcaacatggcaatctggttttcagccccttccagttcaatcacgggtttatgttgttgcttcgccgcctgcaatagctggtaatcgataccgtattctgcccgcagccccagtttttgtgcctgcgtcgcctgaagaaccatcgcgatttgccacagcggttgggtagaaaagagtgagggagaaatgcccatctcctggctaatgtgctgcaggttttggagttgctcctcgctaatgcgctcttccagcgcctcgcaggcaggcaaattagcaaaaggcgtatcgctggtggaaacatccgcctcgacgatcagcgcatcggcgtttttgagctttttgagcaaacgggtgggcaggggagccatatcgtggctacccatatgaatactgccaatcagatgaaaatggcgattgccggggagggtgatatcgatggcaggccaggtgtaatgattaccgcgcagcgcggcccaaagcgtttttacccggtacaacagatccatacgacctccctttgtgaaatatcatgctagcgcgcggtgagggatggcgcaaatggagttggagacttgtttaatgtgtttgtatgattcagtatgttcttgcatcgctattcacaaggaagcaacagttaaaaaccatgaaacaggcaacaagaaaaccgacgacacccggagatattcttctctatgaatatctggaaccgctcgatttgaaaatcaatgagttagcagagttgctgcatgttcatcgtaatagcgtcagtgcactgatcaataacaatcgtaaactcactactgagatggcatttcgtctggcgaaagtttttgataccacagtcgatttttggctaaacctccaggcggcggttgatctttgggaagttgaaaacaacatgcgcacccaggaagaattgggacggattgaaacagtggctgaatatttggcacgccgtgaagagcgtgcaaaaaaggtcgcgtaaggccaaaacatcgcttcatctcgtaggccggataaggcgttcacgccgcatccggcatccgagcaccattgcctgatgcgacgcttacccgtcttatcaggcctacaaacttgtgcctgaaccgtaggccggataaggcgtttacgccgcatccggcatccgagcaccattgcctgatgcgacgcttacgcgtcttatcaggcctacaaacctgtgcctgaaccgtaggccggataaggcgtttacgccgcatccggcagtcatgcgtcgatgccaaatgcgccaccctaaagcagcgcatccgcaatgatgtacttattccttcggtttaaaccgcagcaaccggttggcgttactcactacggtaatcgacgagagcgccattgccgctccggcaactaccgggttaagcagtgttccagtgaacggccacaaaataccggcggcgaccggaataccgatactgttgtagataaacgcaccgagcaggttctgcttcatgttgtgcagcgttgcgcgggaaatagcgagcgcatccgcaacgcccatcaggctatggcgcatcagggtaatcgccgcggtttcaatggcaacatcactgccgccacccatcgcaatgccgacatccgcctgagccagcgctggcgcgtcgttaatgccgtcgcccaccattgccacctgacgtccttcactttgcagatgtttgatcgcttcggctttaccgtccggcagcaccccggcgatcacctcatcaatccctgcttctttggcgatcgcattggcggtggttgggttatccccggtcaacatcaccagacgatatcccgctttatgcaggcgttgcagcgccgccacgctatcactacgcaacggatcgcgtactgccagcagggctaccgctttcccgtcaaccgccagcagcacaggcgttgccccttgcgatgcctgagcagtaatctccgcttcgatagctttggtaccaacctgttgctcatttaacagcgcctgattgcccagcaataacgcatgaccttcagcttcaccgctcacgcccagcccgcgcaatgtgcggaaaccgttgacctgcggtagctgcatatcacctgctttatcgaggatcgctcgtgccagcggatggctggaaccttgctccagtgccgccgccagacgcaatgcctgcgcttcatcaacatcagcaaatgttttcactgcgacaacctgcggcttcccttcagtcagcgtcccggttttatcgaacactacagtgtcgagtgtactggcgcgttgcagcgcgtcagcgtcccgcaccagcacgccaaactcagccgcccgcccgacgccggaaataatcgacatcggcgtcgccagccccagcgcacacggacaggcaataatcagtaccgtggtggcaatcaccagggtatagacaatctgcggtgccggaccaaagaaataccagattgccgcactgacaagcgcaataaccaccactaccggcacaaatacggctgagattttatccgccagctgaccgatttctggcttgctgctctgggcctggcgcaccatgcgaatgattcgtgacagcgtagtatggctgccaaccgcactggcacgaaacagcacactgccgtcctgtaccactgtcccggcatggacgctatcgccttcgcctttttgctgcgggattggttcgcccgtcagcatcgcttcatccagccatgcttcgccctgggtaatctcgccatctaccggcacgcgatcgccggtcgtcaggcgcagcaacatacctggctgcacttctgccagaggcacgcttttttcaccttcgtcagtaaccaggcgtgccgtcggcggggttaaatcgagtaacttttccagcgccttagaagaacgctggcgtgcgcgcgcttccagcatatggccgagattgatcagaccgataatcatcgcgctggcttcgtaataaagatgtcgcgcttccatcgggaaccactgcggccacaggttgacgctcatcgaatagagccacgccacgccagtacccagcgccaccagcgtatccatcgtcgccgcaccgttcagcaggcttttccatgcactgcggtaaaaatggccgccggcgaaaaccatcactgccagggttatcaggccgataaccaaccacaggctgcggttgtcagcggtgaccatcatgttatcgccgatcatcccccagaccatcaccgggatacccaccgccagtgcgacaattgcctgccagcggaagcgcttcatcgtagcgacggcggtttcttgctggcgctcgcggcgtttagcgtcatcttcaatcgcttccgcgccgtagcccgctttttccaccgcctgcactaaatcttgtggggaggcactgcccatcaccagcgcagtacgctccgccaggtttacccgtgcctgagtgacgcccggtacgctttgcagcgcattttgtacgcgggtgacacagctggcgcagctcatgccgctcagcagcaactgctggctgtcatcgtcatcggcggtcgctgccggaagcgcctcagaaaccgctgtcagtgcttccgacgggattgatgactccgccagcggtttagcctttgggtggcttacagatgcgtcataacccgcttgtttgatggtttcgatcagctgttctgcactggcagtcccggtaacgtgcgcttcagtgatagacacatccgcctgctcaacatccggacgctgttcaagactttctttcacgcgtttaacgcagtgaccgcaggacaggccgtccagggtcaggtcgatagtttgtgacataaaacactcctttaagacagttttgactggctgtgataaaggttaaaccttccagcaaggggaaggtcaagaaattaataaaccaggcgggtaaaagtccgtaaagattaaaaaatcggctcgatttgcatcaggattagacatttatctctttgttttcctgtagttaagttgcgggtgctaagttaaatcaggatgcctgaaaatcggcaccggggtgaggaattacctcccgcatctataaaaaggagttaacaaaagatgttagatgcaaacaaattacagcaggcagtggatcaggcttacacccaatttcactcacttaacggcggacaaaatgccgattacattccctttctggcgaatgtaccaggtcaactggcggcagtggctatcgtgacctgcgatggcaacgtctatagtgcgggtgacagtgattaccgctttgcactggaatccatctcgaaagtctgtacgttagcccttgcgttagaagatgtcggcccgcaggcggtacaggacaaaattggcgctgacccgaccggattgccctttaactcagttatcgccttagagttgcatggcggcaaaccgctttcgccactggtaaatgctggcgctattgccaccaccagcctgattaacgctgaaaatgttgaacaacgctggcagcgaattttacatatccaacagcaactggctggcgagcaggtagcgctctctgacgaagtcaaccagtcggaacaaacaaccaacttccataaccgggccatagcctggctgctgtactccgccggatatctctattgtgatgcaatggaagcctgtgacgtgtatacccgtcagtgctccacgctcctcaatactattgaactggcaacgcttggcgcgacgctggcggcaggtggtgtgaatccgttgacgcataaacgcgttcttcaggccgacaacgtgccgtacattctggccgaaatgatgatggaagggctgtatggtcgctccggtgactgggcgtatcgtgttggtttaccgggcaaaagcggtgtaggtggcggtattctggcggtcgtccctggagtgatgggaattgccgcgttctcaccaccgctggacgaagatggcaacagtgttcgcggtcaaaaaatggtggcatcggtcgctaagcaactcggctataacgtgtttaagggctgatcatgatgaacacggaaggtaataacggtaacaaacctctcggtctatggaacgtcgtttccatcggcattggggcaatggtgggggcggggatcttcgcgctgctggggcaggctgcattgctaatggaagcctcgacctgggtcgcctttgcttttggcggtattgtggcgatgttttccggttatgcctatgcgcgtctgggggcgagctatcccagcaatggcggcattatcgacttctttcgtcgcggattaggcaacggcgtcttttcgctggcgctctcgttactgtacctgttgacgctggcggtgagcatcgccatggtcgcccgtgcttttggcgcttatgccgtgcagtttttgcatgaaggcagccaggaggagcaccttattttgctctacgcgttggggatcattgcggtgatgacgcttttcaactccttaagcaaccatgcggtagggcggctggaagtgatcctcgtcggcattaaaatgatgatcctgttattgctgattattgccggtgtctggtcgctgcaaccggcgcatatttccgtctctgcgccccccagctccggtgcgttcttctcctgtattgggataactttccttgcctatgcgggctttggcatgatggcgaacgcggcggataaagtgaaagatccgcaggtcattatgccacgggcgtttctggtggcgattggcgttaccacgttgctttatatctcgctggcactggttttgcttagcgatgtatcggcattagagttagaaaaatatgccgataccgccgtagcgcaggctgcttctccgctgctcgggcatgtgggttatgtgatcgtcgtcatcggcgctttactggcgacggcttcagccattaacgcgaacctgttcgccgtgtttaacatcatggacaacatgggcagcgaacgcgaactgccgaagctaatgaataaatccctgtggcggcagagtacctggggcaacattattgtcgtggtgttgattatgctgatgacggcggcactgaatttaggctcactcgccagcgttgccagcgccacctttttgatttgctacctggcggtgtttgtggtggcgatccgcctgcgtcatgatattcacgcctcgttgccgattcttatcgttggtacgttggtgatgttgttggtgatcgttggctttatctacagtctgtggtcccagggtagccgtgcgttgatatggattattggctcactcttactcagccttattgtggcaatggtcatgaagcgcaataaaaccgtataacatctctctgtgcgcagtacttcctgtattattgtggtggcggtcgatattcgcactggcaaaaaaacgtgcttgaatatctgttgaaaccctttaacaaagcacaggaggcgttgcgcgaacgatgaacatcagcgatgtagcaaaaattaccggcctgaccagcaaagccattcgcttctatgaagagaaggggctggtgacgccgccgatgcgcagcgaaaacggttatcgcacctacacgcagcagcatctcaacgaactgaccttactgcgccaggcacggcaggtgggctttaacctggaagagagcggcgagctggtgaatctgtttaacgacccgcagcggcacagcgccgacgtcaaacggcgcacgctggagaaggtggcggagatcgaacgacacattgaggagctgcaatccatgcgcgaccagctgctggcactggcgaatgcctgccctggcgatgacagcgccgactgcccgattatcgaaaatctctccggctgctgtcatcatcgggcagggtgattaagacgagacggctcggatatgtagggttatcccttctatcgcaatgacttcaacatgcgtacctgcaccgagatcctcgctggcgctgacaggccatgaactgtcaccgacgcgcatatgaccgcgcccgttgaccagcggagattccagcacaaaacgtcggccaatcagctgctgcccgcgctggtttaaatgactatcgctgtgcttttgttcgcgcacccgccgcgacaaccatttccaccacagccaggcggcgagcagcgtcaggatggcaaacattaccccttgccactcccaacccagcggcaccagccagaccaccaggccggtaatcaccgctgccacgccgctccacaacaaataaccatttccgcccagcatctcggctgccagcagcaaaccgccgagactgagccagaaaatatgtggatgaacgaccattaactccatcatggctgagtccgtttgttggcgctgtctttcaccagctcggcaatcccggcaatcgaccccatcaggctgctggcctctaatggcatcatcactactttgctgttactggaggaaccgatctgctgtaacgcttcggtgtatttctgcgctacgaagtagttcaccgcctgaatatcaccggaggcgatagcttcagacaccattttggtggcgcgggcttctgcttcggcggaacgttcacgcgcttcagcctgtaaaaacgccgactgacgttcgccttccgctttcaggatttgcgactgtttttcaccttcggctttgaggatttccgcctgacggatcccttccgcttcaagaatgtaagcgcgtttggtacgttccgctttcatctgcgcgttcattgaagagataagctctgccggtgggcgcacgtcgcgaatttcaatacgggtgactttaatcccccacgggttggtggcttcatcgacaatacgcagcaggcgtgagttgatgctgtcgcgctgagagagcatttcgtcaagttccattgaacccagcacggtacggatgttagtcatggtcaggttgatgatcgccagctccagattgctgacttcataagccgcgcgcggcgcgtcaatcacctgaataaagcacacggcgtcgatggtaacgttggcgttatctttcgagataacttcctgggaagggatatcgagcacttgctccatcatattgatcttgcgaccaatgcgatccataaacggcaccaccagactgagccccggctgtaacgttttggtatagcgaccaaagcgttctactgtccactgatagccctgcggtacgattttgacacccgcgccgacaatgaccagcgcgacaaaaatgagaatcgggataaagataagcatcggaaaaacctcctgttgtaccgtccataatcagcaaaattgctgcttgattaaacaaattatacctgattactgaaagagagttcccccttattcctgcgaaggataaactgtttttagtaaaaatcagaaaaagggaacagcgatgcaggaaaatagtcctttgcttcagctacaaaacgtaggatatctggcgggtgatgcgaagattcttaataacatcaatttttcgctgcgtgctggcgaatttaagttaattaccggtccttctggttgtggcaaaagtacgctgctaaaaatagttgcttcattgatcagcccaaccagcggaacgttactgtttgaaggtgaggatgtcagcacactaaagccagaaatctaccgccaacaagtctcttactgcgcccagacaccgacgctgtttggcgatacggtatacgataatctgatctttccctggcagatccgtaaccggcagcctgacccagccatttttctcgattttctcgaacgcttcgccttgccggacagcattttgacgaagaatatcgccgagctatctggtggtgaaaaacaacgcatctcattgattcgtaacctgcaatttatgccgaaggttttattgctggatgaaataaccagtgcgctggatgaaagtaataaacataacgtcaatgagatgatccatcgttatgtgcgcgagcaaaatattgccgtgctgtgggtgacacacgataaagacgaaattaatcatgcggataaagtgattacactgcaaccgcatgccggagaaatgcaggaagcacgctatgaactcgcataatattactaacgaatcattagcactggcattaatgctggtggtggtggcaatcttaattagccataaagaaaaactggcgctggagaaagatattctctggagcgtcgggcgagcgataattcagctgattattgtcggctatgtgctgaagtatattttcagcgtggatgatgccagcctgacattattgatggtgttatttatctgctttaatgcggcgtggaacgcgcaaaaacgcagtaaatatattgctaaagcttttatctcatcgtttattgccattacggtcggggcgggaattaccctggcggtgctgattctctcagggtcgattgaatttatcccgatgcaggtgatccctatcgccgggatgattgccggtaacgccatggtagcggtggggttgtgttacaacaatttagggcaacgggtcattagcgaacagcaacagattcaggagaaactgagtcttggtgcgacgccgaagcaggcttcagcgatattgattcgcgacagtattcgcgcggctttaattccgacggtcgattcagcaaaaacggttggcttagtgagtttaccaggaatgatgtccgggctgatatttgccgggattgatccggtgaaggcgattaaatatcagattatggtgacctttatgctgctctcaaccgccagcttgtcgaccattattgcctgctatttaacctatcgtaagttttataattcgcgccaccagttggtggtgacgcaattgaagaagaaatgatgcgatgccggatgcgcagcatcgcatccggcgttgtggttcatgtgccgatcaacggaatatcaatacaacaatgcatacagctggcggcgatacttcgacgccagtgcatcacccgtacccagcgcagcgaggatctcctggaacgttttacgcgtctgaccgtctgcggcggtgagatctttacgcagatgcccgaacagcaactccagcgcctcttcattgcgcccaacctgatgcagttgcagcgccagttgcgtcgccagtgcggcatcttctggattctccgccacctgctgttgcaactgttgaatttccggcgtatcagccgcctgcttcagcagttcgatttgcgccaccagcccctggtagcgggtgtcctgatcctgcaacggaatggttttcagcaccgcttccgcatcttcagaacggttcagcgcaatcagcgtttctgccagcagcaggccgatctccccgttctgattcgacaactgccaggcgtctttcagcaatggcagggcatcggtgtaattgctttcctgcatcagttgcatcgcctgctgcgctttcagctcttcttcgcgcggcagcactttatccagcagggcgcggatcgcctcttccggttgcggcccctggaagccatctaccggttgcccgttctggaacagatacacggtcggaatcgcacgcagaccaaactgcgcggcaatcatctgctccgcgtcgcagtccagcttcgccagaataaattgcccgttgtactgcgccgcgaggctttccagaattggggttaactgcaaacagtgctggctacgttcagaccaaaaatagaacagcaccggagtggtcatcgactgttcaagaacctgttgcaggttagattcgttaatgttgacaatattttctacggacatggagtcgctctctgttgtcgatattttctttgacatgggggcttaagcgcgcgcttcaactcacccctgcaatattttgtccatcacgcgccccggcagcaggcgcttaagcaccattaccgcccaggtcaccagcgtcaccggatagcgcatcttcggcttctcgctaataaaagcatggcgtactttgtccaccaccgcttccggtcccaacgtaaagcgggcggcgatgccgggattttcgactggtttatcactttgcgtctggttgacgttgtcggtgaagcgagtacgaatgggaccgggttcgatcaggctgactttaattccgctgtggcgcagctccatgcgcagtgcatctgaccacgcctccagcgcatatttactggccgcgtaagcgccacgacccggcgtggagattaatcccatcaccgatgatgtcatcacaatacgcccttcaccgtgcggtaacatcgcgggtaacaggcgcatggtgagctggtgtgcgccgaaaaagttggcggaaaactgctgttccatctgcgcacggctgatggtggaaagggggccatacatgccgaatccggcattgttaaagatcccatacagacaattatcggtcagggcgatcacctcgtcggctgcgcgatcaacactttctggtgaatccagatcgatcaacacgccggtaaatcccatgctgttcatgcgctcaacatcatccggtttccggcaacctgccagcacatgaaaaccctggcgttttaattcgagcgcgctttccaggccaattccactggaacatccggtaattaagaccgatttttgcataactttacctgtcaggatctccgttgctttatgagtcatgatttactaaaggctgcaactgcttcgccatccagtcggcaataaacggctgggcgtcgcggttgggatgaataccgtcatcctgcatccattgtggcttgaggtagacctcttccataaaaaagggcagcagcggaacatcaaactctttggcgagtttggggtaaatggcgctaaaggcttcattataacggcgaccatagtttgcaggcagacgtatttgcattaacaatggttcagcgttggcggctttgacatcctgcaaaatctggcgcagcgtttgctcggtttgctgtggctgaaaaccacgcaaaccgtcattgccgcccagttcaaccagcacccaacgcggctgatgctgtttcagcagagccggaaggcgcgccagtccttgttgcgaggtgtcgccgctgatgctggcattaactaccgacgttttactctgccacttatcattcaacaaggcaggccaggccgcgctggcagacattcgatacccggcgctcaggctatcacccagaatcaataacgtgtccgctgcggcggcacggaaggttaacaggaccaggaacaggaagggcaaatgccagcggaaaacattgttgaagttcatcatcttaagaagtccgtcggtcagggggagcatgaactctccatcctcaccggagttgagctggttgtcaaacgtggcgagaccatcgcactggtgggcgagtcgggatcgggtaagtcaaccttgctggcgatcctcgccgggcttgatgacggcagcagtggcgaagtgagtctggtgggacaaccgctacataatatggacgaagaagcgcgggcaaagttgcgcgcgaagcacgtcggctttgtttttcagtcatttatgttaattcctacccttaacgcgctggaaaacgtcgagcttccggctctgctgcgcggtgagagtagcgcggaaagtcgtaacggggcgaaagcgttgctcgaacagttagggctgggtaaacgtctggatcatcttccggcacagctttccggcggtgaacagcaacgagtggcgctggcacgagcctttaatggtcgacctgatgtgctgtttgccgacgaacccaccggcaaccttgaccgccagacgggcgataaaattgccgacctgctgttttccctcaaccgtgaacatggcaccacgttgattatggtgacccacgacctgcaactggcggcacgctgcgaccgctgcttacggctggtgaacgggcagttgcaggaggaagcatgattgcacgttggttctggcgcgaatggcgttcgccgtcgctattaattgtctggctggcgctaagcctggcggtggcctgcgtgctggcgctgggcaatatcagcgatcgcatggagaagggcttaagccagcaaagccgtgagtttatggcgggcgatcgggcgttgcgcagttcacgcgaagtgccgcaagcgtggctggaggaagcgcaaaagcgcggcctgaaagtcggcaagcagctgactttcgccacaatgacctttgcaggcgacacaccgcagctggcgaacgtcaaagcggtggatgatatctacccgatgtatggcgatctgcaaactaatccccctggcctgaaaccgcaggcgggcagcgtattgctggccccacgcctgatggcactgcttaacctgaaaacgggcgacaccattgacgtgggcgatgccaccttgcggattgccggagaagtgattcaggaaccggattccggttttaaccccttccagatggctccgcgtctgatgatgaatctggcggatgtcgataaaaccggagccgtgcagccggggagtcgggtcacctggcgttataaattcggcggcaacgagaaccagctcgacggctatgagaaatggttgttacctcagcttaaacccgaacaacgctggtacggtctggaacaggacgaaggcgcgctggggcgatcgatggaacgctcgcaacagttcctgctgctttcggcgcttctgaccttgctgctggcagtggcagcggtggcggtagcgatgaatcattactgtcgcagtcgctacgatctggtggcgatcctcaaaacgctgggggcagggcgagcgcaactgcgtaagctaatcgtcggtcagtggttgatggtgctgacgctttcagccgttaccggtggggccataggcctgttgttcgaaaacgtgttgatggtgctgctcaagcccgttctgcctgctgcactaccgccagccagcctctggccgtggctgtgggcgcttggcaccatgacggtcatctcgctgctggtggggctacgaccatatcgcttgttgctggcaacgcagcctttacgcgtattacgtaatgatgtggtagcgaacgtctggccgctgaagttttatctgccgattgtcagtgtggtggttgtgctgctgctcgccggattaatgggtggcagcatgctgctttgggcggtgctggcgggcgcggtagtactggctttgctgtgcggtgtgctgggctggatgctgctgaatgtacttcgccgcatgacgctgaaatcgctgcctctgcgcctggcggttagccgcctgttacgtcagccgtggtcaacgttaagtcagctttcggcattttcgctctcctttatgctgctggcactgctgctggtgttgcgtggcgatctgctcgaccgctggcagcagcagctacctccagaaagcccgaactactttttaattaacatcgccacagaacaggtagcaccgctaaaagcgttcctcgcggaacatcagatagtcccggaatcgttttatccggtggtgcgggcgcggctgacggcgattaacgataagccgacagaaggtaatgaagatgaggcgcttaaccgcgaactcaatcttacctggcaaaatacgcggcccgatcataatccgattgtcgccggtaactggccgccaaaagccgatgaagtgtcgatggaagaggggctggcgaaacgcttaaacgttgccctcggtgataccgtgacttttatgggcgatacccaggagttccgcgctaaagtgaccagcctgcgcaaagtggactgggaaagtctgcggcctaatttctattttattttccctgaaggggcattagacgggcaaccgcagagctggcttaccagtttccgctgggagaatggcaacggcatgttgacacaactcaaccgccagttcccgaccattagcctgttagatattggcgcgattttaaaacaggtcggtcaggtgctggagcaggtaagtcgggcgctggaagtgatggtggtactggtcaccgcctgcggtatgttgctgttgctggcacaggtgcaggtgggaatgcgtcagcgtcatcaggagctggtggtgtggcgcacactcggtgcggggaaaaaactgctgcgtaccacgttgtggtgtgagttcgccatgcttgggtttgtttccggcctggtggccgcaattggtgcggaaacggcgctggcagtgttgcaggcgaaagtgtttgattttccgtgggagccagactggcgattgtggattgttctgccgtgcagcggagcgctgctgctgtcgcttttcggcggctggctgggtgcgcgactggttaagggtaaggcgctgttcaggcagtttgcggggtgatgagagtaaataaggggcgttctggttgaatggaacgccttgtttaaattaattctacaatatgtttcattgatgatgttattgaattggtgatttcctatctttctattgctgatattaatctgaatcggtggagtttattgattttaaatatagccctacaaaaataactcagactaataaaatcataaatcatatgcgttgaatggatattatccatatagtgaatttgttgatgatgaattcatctgtgctaaaaatgttagtttaataaaatattgaaagtgacctgtaataacagttgttgttgattgagaacaaataagtttatgtgaaaaatatataaatacattagctggtcttgtgtgtcattttatttttttttgttgctaacacagggatatgaacaataactaaaagggcactttatatgagcggaaaaccagcggcgcgtcagggagatatgactcagtatggcggtcccattgtccagggttcggcaggtgtaagaattggcgcgcccaccggcgtggcgtgctcggtgtgtccgggcgggatgacttcgggcaacccggtaaatccgctgctgggggcgaaggtgctgcccggcgagacggaccttgcgctgcccggcccgctgccgttcattctctcccgcacctacagcagctaccggacgaagacgcctgcaccggtgggcgttttcggccccggctggaaagcgccttctgatatccgcttacagctacgtgatgacggactgatactcaacgacaacggcgggcggagcattcactttgagccgctgctgccgggggaggcggtgtacagccgcagtgagtcaatgtggctggtgcgcggtggtaaggcagcacagccggacggccatacgctggcgcggctgtggggggcgctgccgccggatatccggttaagcccgcatctttacctggcgaccaacagcgcacaggggccgtggtggatactggggtggtctgagcgggtgccgggtgctgaggacgtactgccagcgccgctgccgccgtaccgggtgcttaccgggatggcggaccgcttcgggcggacgctgacgtaccggcgtgaggccgccggtgacctggccggggaaatcaccggcgtgacggacggtgccgggcgggagttccgtctggtgctgaccacgcaggcgcagcgtgcggaagaggcccgcacctcttcgctatcttcttctgacagttcccgccctctctcagcctcagcgttccccgacacactgcccggtaccgaatacggccccgacaggggtatccgcctttcggcggtgtggctgatgcacgacccggcatacccggagagcctgcccgctgcgccactggtgcggtacacgtatacggaagccggtgaactgctggcggtatatgaccgcagcaatacgcaggtgcgcgctttcacgtatgacgcgcagcacccgggccggatggtggcgcaccgttacgcgggaaggccggagatgcgctaccgctacgacgatacggggcgggtggtggagcaactgaacccggcagggttaagctaccgctatctttatgagcaggaccgcatcaccgtcaccgacagcctgaaccggcgtgaggtgctgcatacagaaggcggggccgggctgaaacgggtggtgaaaaaagaactggcggacggcagcgtcacgcgcagcgggtatgacgcggcaggaaggctcacggcgcagacggacgcggcgggacggaggacagagtacggtctgaatgtggtgtccggcgatatcacggacatcaccacaccggacgggcgggagacgaaattttactataacgacgggaaccagctgacggcggtggtgtccccggacgggctggagagccgccgggaatatgatgaaccgggcaggctggtatcggagacatcgcgcagcggggagacagtacgctaccgctacgatgacgcgcacagtgagttaccggcgacgacaacggatgcgacgggcagcacccggcagatgacctggagccgctacgggcagttgctggcgttcaccgactgctcgggctaccagacccgttatgaatacgaccgcttcggccagatgacggcggtccaccgcgaggaaggcatcagcctttaccgccgctatgacaaccgtggccggttaacctcggtgaaagacgcacagggccgtgaaacgcggtatgaatacaacgccgcaggcgacctgactgccgttatcaccccggacggcaaccggagcgagacacagtacgatgcgtggggaaaggcggtcagcaccacgcagggcgggctgacgcgcagtatggagtacgatgctgccggacgtgtcatcagcctgaccaacgagaacggcagccacagcgtcttcagttacgatgcgctggaccggctggtacagcagggcggctttgacgggcggacgcaacgttatcattatgacctgaccggaaaactcacacagagtgaggatgagggacttgtcatcctctggtactacgatgaatcggaccgtatcactcaccgcacggtgaacggcgaaccggcagagcagtggcagtatgatggccacggctggctgacagacatcagccacctgagcgaaggccaccgtgttgccgtccactatggctatgacgataaaggccgcctgaccggcgaatgccagacggtggagaacccggagacgggggaactgctgtggcagcatgagacgaaacacgcatacaacgagcaggggctggcaaaccgcgtcacgccggacagcctgccgccggtggagtggctgacgtatggcagcggttacctggcgggaatgaagctgggcgggacgccgctggtcgagtatacgcgggacaggctgcaccgtgagacggtgcgcagcttcggcagcatggcaggcagtaatgccgcatacgaactgaccagcacatacacccccgcaggccagttacagagccagcacctgaacagcctggtatatgaccgtgactacgggtggagtgacaacggcgacctggtgcgcatcagcggcccgcgacagacgcgggaatacggctacagcgccacgggcaggctggagagtgtgcgcaccctcgcaccagacctggacatccgcatcccgtatgccacggacccggcgggcaaccggctgccggacccggagctgcacccggacagtacactcacagtgtggccggataaccgcatcgcggaggatgcgcactatgtctaccgccacgatgaatacggcaggctgacggagaagacggaccgcatcccggcgggtgtgatacggacggacgacgagcggacccaccactaccactacgacagccagcaccgcctggtgttctacacgcggatacagcatggcgagccactggtcgagagccgctacctctacgacccgctgggacggcgaatggcaaaacgggtctggcggcgggagcgtgacctgacggggtggatgtcgctgtcgcgtaaaccggaggtgacgtggtatggctgggacggagacaggctgacgacggtgcagactgacaccacacgtatccagacggtatacgagccgggaagcttcacgccgctcatccgggtcgagacagagaacggcgagcgggaaaaagcgcagcggcgcagcctggcagagacgctccagcaggaagggagtgagaacggccacggcgtggtgttcccggctgaactggtgcggctgctggacaggctggaggaagaaatccgggcagaccgcgtgagcagtgaaagccgggcgtggcttgcgcagtgcgggctgacggtggagcaactggccagacaggtggagccggaatacacaccggcgcgaaaagctcatctttatcactgcgaccaccggggactgccgctggcgcttatcagcgaagacggcaatacggcgtggagcgcggaatatgatgaatggggcaaccagcttaatgaggagaacccgcatcatgtgtatcagccgtaccgtctgccagggcagcagcatgatgaggaatcagggctgtactataaccgtcaccggtactacgatccgttgcaggggcggtatattactcaggacccgatggggttgaaagggggatggaatttatatcagtatcctttaaatccactacaacaaattgaccctatgggattattgcagacttgggatgatgccagatctggagcatgtacggggggagtttgtggtgttctttcacgtataataggaccaagtaaatttgatagtactgcagatgctgcgttagatgctttgaaagaaacgcagaatagatctctatgtaatgatatggaatactctggtattgtctgtaaagatactaatggaaaatattttgcatctaaggcagaaactgataatttaagaaaggagtcatatcctctgaaaagaaaatgtcccacaggtacagatagagttgctgcttatcatactcacggtgcagatagtcatggcgattatgttgatgaatttttttcaagtagcgataaaaatcttgtaagaagtaaagataataatcttgaagcattttatctcgcaacacctgatggacgatttgaggcgcttaataataaaggagaatatatttttatcagaaatagtgtcccgggattgagttcagtatgcataccgtatcatgattaattttagtgcttttattagtggggcctataaggagattcaatgaaatatagttcaatattttcgatgctttcattttttatactatttgcctgtaatgagacagctgtttacggttctgatgaaaacattatttttatgaggtatgtggaaaaattacatttagataaatactctgttaaaaatacggtaaaaactgaaacaatggcgatacaattagctgaaatatatgttaggtatcgctatggcgaacggattgcagaagaagaaaaaccatatttaattacggaactaccagatagttgggttgttgagggagcaaagttaccttatgaagttgcgggtggtgtatttattatagaaattaataagaaaaatggatgtgttttgaatttcctacatagtaaataatgctggcgctgatggatgcggatggaaacattgcgtggagcggggagtatgatgagtggggcaaccagctgaatgaagagaacccgcatcacctgcaccagccgtaccggctgccggggcagcagtatgataaggagtcggggctgtactacaaccggaaccggtactacgatccgttgcaggggcggtatatcactcaggacccgatagggctggaggggggatggagtctgtatgcgtatccgctgaatccggtgaatggtattgatccattagggttaagtcccgcagatgtagcgctaataagaagaaaagatcaactaaaccatcaaagagcatgggatatattatctgatacttatgaagatatgaagagattaaatttaggtgggactgatcaatttttccattgtatggcattttgtcgagtgtctaaattaaatgacgctggtgttagccgatcggcgaaagggctgggttatgaaaaagagattagagattacgggttaaatctgttcggtatgtacggcagaaaagtaaagctatcccattctgaaatgattgaagataataaaaaagacttggctgtaaatgaccatgggttgacatgtccatcaacaacagattgctcagatagatgtagtgattatattaatccagagcataaaaaaacgataaaggctttacaagatgctggctatctcaagtaatctatcaaagatgataatatttatttttgctattataatcattgttgttttatgcgtaattacttatctttatttatacaaagatgaatctcttgtaagtaaacattacataaactatatggcaataccagaaaatgatggagtttttacatggctcccagatttttttccgcacgtagcggtggatatatcaatatacacaaatgtagaagatgattatttttttcttatttttccctaacaaatgatgatgggggtaggtttaagaaaacattgacagtgagggccagggaacaagtggcgaaaatcgtatcaaagaatgatccagatacaaaaaaagtgtggtgtaaatatggtaagataccagggcaaggggatggtgtaaaccttttttttgttggtgaaattaatgttacgcattattttataacaaatattggagctggattgcctgatgcttgtgcagagtaattgcttgaattaagagtctatcccatatcgaagtcgtcaacttcgtagtgaggaaaagtaaaattcctgactgagaaaagacatgtcggctattgtgtaaagccatatagctcagacgatgaatatctactcgtattcagttgtttattgagggtgagttccgaccctgaaacaacaaataaaatgaacagtcagagagtttacatagaattgcactggtcttttacgatatctgacattgtgtaatacatattcagccatgcattaattaaaatgttacgtgtttaatgtgagtccctatctgaaaataaataatccttccggattaaaataaattcttgccgggaaagaaagaggaaataaaccattagcggaaaaccagcggcacgccagggtgacatgccccagtacggcggcccgatagtccagggttcagcgggggtactgatagtcgcgccgactgcatcgagaactccatacaactttttacggaacgtcacctgataaaatttgttcagtatcgtcttttgagattctcaaggttatggagtaaccagacagaacggacaccactgtcggagataaaaaccccctgtttacgcagctcgttgctggcccggtgctgaccatgtgtcgggaaagcgacggcgtaatcaacaacagcctgttcagttgcctcatcggtacggttcttaaggttaggagcgcggcgactacgattaatctgcgcatccacaccgccttcagcgaccagttcgcggtaacgataaaacgtatcacgcgaaacgcccatgattttacaggcttttgatacgttgctgagttcttcagccagattgagcaaaccggctttgtgtttgatgacgggattggcagtatgaagcatgagagttacctcttgttttggataaggattcgacactcatatcaaaaccggtaactctcaacctttcaaggccatgtgtcagatcaagtcgcgactaatacaaatacgtccctcattaccgcgccttaacccattccgccacttccgcccactcaccgcgaaagacaactttttccgcttttttctcaagctgatagcgatacatcgggtcgtaatattcttcaagtaacggcaccagccaggccagatgaccgtcggtgctgccggtggtgagttgcgttgtcagtgctgcatccagccttgcagccagttcgttatagcgctgtagccccagccgacgcttaatcgccgaaagtccgtgatgcaggtattcgcaatactcctgccagccctgttcgtcgccgtacgcgtgggtaaaatcatgatgcatacgcaagaaatactcttcgttcaggcgctcaagacggatctcaaacggatcttctaccaccgcaatcgccgcctgagtcattcgctcgcgcaggcattccggcaggtgattcgaaccgatcatccggctttcgtcttccagcacccacaggcgcaaattctgacgggcgtcggtttttagcatttcggcagccagcaggttttcaaaactcgcctggctaagttgtggttgtaacgtgcgaccaaacgccgaaccgcgatgacgcgccaacccttccagatcaacaccgttcggctgttgctgcactaacagcgttttaccgctgccggtacaaccgccaatcagcactatcggtttttgtgccagttcaatagtcgcctgaatcgcggtctggcgcagtgccttataaccgccttccaccagcggataatcaatccccgctgcatgcaaccagctttgcacaatatgtgagcgctgaccgccacgggcgcagcagagaataccttgcggattttgcaggcacgctgcccgccaggcgtccatgcgctgctgacgaatttcacccgccaccagtttatgtcccagcgccagcgctgcgtctgagccttgctgtttatagcaggtgccaacggcggcgcgttcatcgttattcattaacggcagattgatagcggcgggcattgcgccgtgctcaaactcgataggggcgcgaacatcaataatgggcgtatcagcaatcagcagggcacgatagtcctgttccgtgtgtctctcttgcatagttaaaagtgaacctcaaatcagcttgcgcgctattttacgcgccaacgcgcaaggaaacttgatttttaactgcgtgggttgccgaaaatttctaaaaatccgctgatttccggcctgcgctgggtaaacaaggtcacaatatcttctaccgctttgccgctgccaaatttgcgccatgccagactcaatggcgaaggagggcgcatcgttgggattacccggctgaccagttgttgattatcgatcattgactggcaaagcgattttggcaaaaaaccaatgccaacgcccgccagatgggcggcgattttcgtttccatatcgggaacaataatctctttttgccctggcaatcgccaggcgacgcgtttggttaaggtgcgggcgctgtcttcaatattgaccgccggaaagcgccgcaactgcgcttctgttagcggctcttcaacgttcgccagcggatgatccgccgccatgacaaagcgccattgcaccgatcctaagggatcaagactaaaggtatttgccagcgcctcagttcccgtgacgccgatagccagcgaaaaaccttcgtacaatagcgagtcccagacgcccatatagatttgtcgggagatgtgaaactgggtaaaggggtaacgctcattcagccacgccagcaactgggcgacggcctgggggttgtagagcaggttgttgatgacaatattcacctggcgttccacgccatcattcacctgttgcagctcgcttggcatactttccagccagctcagccagtctctggcctgggaaagtagatgctcgccagccgctgtcaacgtcacgctgcgagtcgtacggaaaaacagcgctactccggtattctcttccagaagtttaatgcgataactgatcgtcgccgtggttttacataatcgttctgccgcttttgaaaaacttcctgtttcagcaaccgcaatgaaagtccgcaaggtttctggatcgaacatcttcaggtatccccttttaaatccgcaagttgcgtgattttcttatcctctgatttatcagtatttttacatgataaccctgttcaatttgtggactaaatctagttttggaaaaatattccaacttttgtattgatgttgttctcttaaggttttagattgcctgttattgaaaccaagctgaccggtcggcggtggttgaacggaattatgttacaaggacaaaaagatgaaacttcaggtattaccgttaagtcaggaagcctttagtgcttatggcgacgtaatcgaaacgcagcaacgggattttttccatattaacaatggcctggtggagcgttaccacgatttggcgctggttgagattcttgagcaagactgtacgcttatcagcattaaccgcgcgcaaccggcgaatctgccgctgaccattcacgaactcgaacgtcatccgctgggtactcaggcctttatcccgatgaaaggtgaggtgtttgtggtggtcgtggcgttaggtgacgacaaaccagacctgtcaacgctgcgggcgtttatcaccaacggcgaacagggagtgaattaccatcgtaacgtctggcatcacccacttttcgcctggcagcgcgtcaccgattttctgaccatcgatcgcggcggcagtgacaactgtgatgttgaaagtattcctgaacaggaactctgttttgcgtgacgcctgcaaccgacttgcataagataaactaattgttcattgtttatgctcacttgtaggtcggagttaacgtaggtatgacggaagttagacggcgcggcaggccaggacaggcggagcctgtggcacagaagggcgcacaggcgttagagcggggaattgcgattctgcaatatttggaaaaaagtgggggaagttcgtcggttagcgatatttctctcaatctggatttgccgctctccacgacctttcgcttgctgaaggttttacaggcagcggattttgtctatcaggacagtcaattaggctggtggcatataggattaggtgtctttaacgtcggtgcggcgtacatccataaccgcgatgtcctctccgtcgccgggccgtttatgcgccgcctgatgttactttccggcgaaacggtcaatgtcgcgatccgtaacggcaatgaagcggtattaattggtcagttagagtgtaaatcgatggtcaggatgtgtgcgccactgggcagtcgtctgccactgcatgcttccggtgcgggcaaagcgctgctttatccgctggcggaagaggagttgatgagcatcattctgcaaaccggtttgcagcagtttacgccaactacgcttgtggatatgcccaccttgctgaaggacctggaacaagcgcgtgaactgggctataccgtagataaagaagagcatgttgtaggtctgaattgcatagcttcagcaatttacgatgatgtcggtagtgttgttgccgctatctccatctccgggccttcatcaagactgacagaagatcgttttgtcagtcagggtgagctggtcagagacaccgcccgcgatatcagcacggcgttgggactgaaagcacatccataatgtctgtcgcatcccgctctgcggagcgggtttttttgacaaaatttgaaagttggaaaaattttccaataaatagaggtaggaataaaatggcaaaaatgagagccgttgacgcggcaatgtatgtgctggagaaagaaggtatcactaccgccttcggtgttccgggagctgcaatcaatccgttctactcagcgatgcgtaagcacggcggtattcgtcacattctggcgcgtcatgtggaaggtgcttcgcacatggcggaaggttatacccgcgcaacggcagggaatatcggcgtatgtctggggacttccggtcctgcgggcacggacatgatcaccgcgctctattccgcttctgctgattccattcctattctgtgcattaccggccaggcaccgcgcgcccgtctgcataaagaagattttcaggccgtagatattgaagcaattgctaaaccggtcagcaaaatggcggttacagttcgtgaagcggcgctggtgcctcgcgtgctgcaacaggcatttcacctgatgcgttctggtcgtccgggtccggtactggtggatttaccgttcgacgttcaggttgcggaaatcgagtttgatcctgacatgtacgaaccgctgccggtctacaaacctgctgccagccgtatgcagatcgaaaaagctgtagaaatgttaatccaggccgaacgtccggtgattgttgccgggggcggggtaattaatgctgacgcagctgcactgttacaacagtttgctgaactgaccagcgttccggtgatcccaacgctaatgggctggggctgtatcccggacgatcatgaactgatggccgggatggtgggtctgcaaaccgcgcatcgttacggtaacgcaacgctgctggcgtctgacatggtgtttggtatcggtaaccgttttgctaaccgtcataccggctcggtagagaaatacaccgaagggcgcaaaatcgttcatattgatattgagccgacgcaaattggtcgcgtgctgtgtccggatctcggtattgtctctgatgctaaagcggcgctgacactgctggttgaagtggcgcaggagatgcaaaaagcgggtcgtctgccgtgtcgtaaagaatgggtcgccgactgccagcagcgtaaacgcactttgctgcgcaaaacccacttcgacaacgtgccggtgaaaccgcagcgcgtgtatgaagagatgaacaaagcctttggtcgcgatgtttgttatgtcaccaccattggtctgtcacaaatcgctgcggcacaaatgctgcatgtctttaaagaccgccactggatcaactgtggtcaggctggtccgttaggctggacgattccggctgcgctaggggtttgtgccgctgatccgaaacgcaatgtggtggcgatttctggcgactttgacttccagttcctgattgaagagttagctgttggcgcgcagttcaacattccgtacatccatgtgctggtcaacaacgcttatctggggctgattcgtcagtcacaacgcgcttttgacatggactactgcgtgcaactcgctttcgagaatatcaactccagtgaagtgaatggctacggtgttgaccacgtaaaagtagcggaaggtttaggttgtaaagctattcgggtcttcaaaccggaagatattgcgccagcctttgaacaggcgaaagccttaatggcgcaatatcgggtaccggtagtcgtggaagttattctcgagcgtgtgaccaatatttcgatgggcagcgaactggataacgtcatggaatttgaagatatcgccgataacgcagcggacgcaccgactgaaacctgcttcatgcactatgaataagggagataaataatgttacgtttctctgctaatttatcgatgttatttggagaatatgattttctcgcccgttttgagaaagctgcgcagtgtggttttcgcggcgttgaatttatgtttccttatgactacgacattgaagaattaaaacatgtgctggcgagtaataaactcgaacatacgctgcacaatttaccggcgggtgactgggcggcgggggagcgcggtattgcctgtattcctggccgtgaagaagagtttcgggatggcgtagcagcagcgattcgttatgcccgtgcgctgggtaataaaaaaattaactgtctggtcggtaaaacgccggctggtttcagcagtgaacagattcacgcaacgcttgtagaaaacctgcgttatgccgcgaatatgctgatgaaagaagatattttattactgattgaacctattaaccattttgatattcctggtttccatctcaccggaactcggcaggcgctgaaattgattgatgatgttggttgctgcaatttgaaaattcagtatgacatttatcatatgcagcggatggaaggtgaattaaccaacaccatgactcagtgggctgataaaattggtcacctgcaaattgccgataatccgcatcgcggcgaaccgggaaccggagaaattaattatgattatctctttaaggtaatcgaaaattctgactacaacggttgggttgggtgtgaatataaaccccaaaccaccacggaagccggtttacgctggatggatccgtaccgttaaaacgtaacgctattcagacaatgcttttttaggccgctaagttggcaggggatcgtgttgtctgaattcaggaaaagcgaaatttaaaagaggttaattatgaaactgggatttattggcttaggcattatgggtacaccgatggccattaatctggcgcgtgccggtcatcaattacatgtcacgaccattggaccggttgctgatgaattactgtcactgggtgccgtcagtgttgaaactgctcgccaggtaacggaagcatcggacatcatttttattatggtgccggacacacctcaggttgaagaagttctgttcggtgaaaatggttgtaccaaagcctcgctgaagggcaaaaccattgttgatatgagctccatttccccgattgaaactaagcgtttcgctcgtcaggtgaatgaactgggcggcgattatctcgatgcgccagtctccggcggtgaaatcggtgcgcgtgaagggacgttgtcgattatggttggcggtgatgaagcggtatttgaacgtgttaaaccgctgtttgaactgctcggtaaaaatatcaccctcgtgggcggtaacggcgatggtcaaacctgcaaagtggcaaatcagattatcgtggcgctcaatattgaagcggtttctgaagccctgctatttgcttcaaaagccggtgcggacccggtacgtgtgcgccaggcgctgatgggcggctttgcttcctcacgtattctggaagttcatggcgagcgtatgattaaacgcacctttaatccgggcttcaaaatcgctctgcaccagaaagatctcaacctggcactgcaaagtgcgaaagcacttgcgctgaacctgccaaacactgcgacctgccaggagttatttaatacctgtgcggcaaacggtggcagccagttggatcactctgcgttagtgcaggcgctggaattaatggctaaccataaactggcctgatacccgcaataaaaatggccgatatcagaaaatgaatcggccagcaatattaaaaaagaaagcagccaaagatgttgcttcagtattaaaaataatatttttattttatttgttcctcatagctagattaaaacaacgttattcgatacgtgaaattaagagggatttatggaacatcagagaaaactattccagcaacgcggctatagcgaagatctattgccgaaaacgcaaagccagcggacctggaaaacatttaactattttaccttatggatgggttcggttcataacgttcccaattatgtgatggtcggcggcttttttattctcggcttgtctacctttagtattatgctggcaattatcctcagcgcctttttcattgccgcggtaatggtattaaacggtgctgcgggcagtaaatacggtgtgccttttgccatgatcctgcgtgcttcttacggtgtacgtggtgcactgtttcccggattattaaggggcggaattgccgccatcatgtggtttggtttgcaatgttacgcggggtcactggcctgcttgattctgattggcaaaatctggccgggatttttaactctcggtggtgatttcactctgttaggcctttctctaccgggcttaattactttcttaatcttctggctggtcaacgttggtataggttttggcggtggcaaagttttaaataaattcactgccattcttaacccgtgcatctatatcgttttcggcggtatggcgatttgggcgatttcactggtcgggatcggtccaatctttgactacattccgagcggtattcagaaagcagaaaacggtggcttcctgttcctggtggtgattaacgcggtagttgcggtctgggcggcaccggcggtgagcgcatccgactttacgcaaaacgcccactcgtttcgtgagcaggcgctggggcaaacgctgggtttagttgtggcctatattctgtttgcggtcgccggggtatgtattattgccggagccagtattcactacggcgctgatacctggaacgtgctggatattgttcagcgttgggacagcctgttcgcctcgttctttgcggtactggttattctgatgacaactatctccactaacgcgaccggtaatattattccagccggttatcagattgccgccattgcaccgacaaaactgacctataaaaacggcgtactgattgccagtattatcagcttgctgatctgcccgtggaaattaatggaaaatcaggacagcatttatcttttcctcgatattatcggcggaatgcttggtccggtaattggtgtcatgatggcgcattattttgtggtgatgcgcggacaaattaatcttgatgaactgtataccgcacctggcgattataaatattacgataacggttttaacctcactgcgttttcagtaactctggtggccgttattttatctcttggcggtaagtttattcactttatggaaccgttatcgcgtgtttcatggtttgtcggcgtcatcgtcgcctttgcggcctacgccttattaaagaaacgtacaacagcagaaaaaacaggagagcaaaaaaccataggttaattaatcccgatattgaacattgagttaaaaaccaatctgtattttacaaggagtttgttatgtcttttgatttaatcattaaaaacggcaccgttattttagaaaacgaagctcgcgttgtagatatcgccgttaaaggcggaaaaattgctgctatcggtcaggatctgggcgatgcaaaagaagttatggatgcgtctggtctggtggtttcgccgggcatggttgatgcgcacacccatatttctgaaccgggtcgtagccactgggaaggttatgaaaccggtactcgcgcagcggcaaaaggtggtatcaccaccatgatcgaaatgccgctcaaccagctgcctgcaacggttgaccgcgcttcaattgaactgaagttcgatgccgctaaaggcaagctgactattgatgcggcacaactcggtggcctggtgtcttacaacatcgaccgtctgcatgagctggatgaagtgggcgttgtcggcttcaaatgcttcgttgcgacctgtggcgatcgcggtatcgacaacgacttccgtgatgtaaacgactggcagttcttcaaaggtgcgcagaagctgggcgaactgggtcagccggtgctggtgcactgcgaaaacgcgctgatttgtgacgaactgggcgaagaagcgaagcgtgaaggtcgcgtaaccgctcatgactatgtggcttcgcgtccggtatttaccgaagtggaagcaattcgccgcgtactgtatctggcgaaagttgctggttgccgtctgcacgtttgccacgtcagcagcccggaaggtgttgaggaagtgactcgtgcacgtcaggaaggtcaggacgttacttgtgaatcctgcccgcattactttgtactggataccgatcagttcgaagaaatcggtactctggcgaagtgttcaccgccgatccgcgatctggaaaaccagaaaggcatgtgggaaaaactgtttaacggtgaaatcgactgcctggtttccgaccactctccatgcccgccggaaatgaaagccggtaacatcatgaaagcatggggcggtatcgccggtctgcaaagctgcatggacgtgatgttcgatgaagcggtacagaaacgcggtatgtctctgccaatgttcggcaaattaatggcgactaacgcagcagatattttcggtctgcagcaaaaaggccgtatcgccccaggaaaagatgccgacttcgtcttcattcagccgaatagcagctatgttcttaccaatgacgatctggaatatcgccacaaagtcagcccgtatgttggccgtaccattggcgcgcgtatcacgaaaaccatcttacgtggtgatgtgatttacgacattgaacagggcttccctgttgcgccgaaaggtcaatttatccttaaacatcagcagtaatctggcccctgcaatgcccgtccttgcggcgggcattctccggttaaggtgtgtttatgttcaattttgcagtcagccgcgaaagcctgttatcaggatttcagtggtttttctttattttttgcaacacggttgtggttcctcctacgctactttctgcttttcagttgccgcaaagtagcctgcttacgctcacgcaatatgcttttcttgctaccgcactggcctgcttcgctcaggcgttttgcggtcatcgtcgcgctattatggaagggccaggtggcctgtggtggggaaccatccttactatcacccttggtgaagcatcgcgcgggacaccgatcaacgatatcgccaccagcctggcagtggggattgcactctccggcgtgctgacgatgttgattggttttagcggattaggccatcgcctggcacggttatttacgccgtcggtgatggtcttgtttatgttgatgctgggcgcgcagctgaccactatctttttcaaaggtatgctcgggctgccgtttggcatagccgacccgaattttaaaattcagttaccgccgttcgcgctctcggtggcggtgatgtgcctggtactggcgatgattatcttcctgccgcaacgttttgcccgttatggcctgctggtcggcaccataaccggctggttgttgtggtacttttgctttccttcttcgcactcgctctccggtgagttgcactggcagtggttcccgctcggcagtggcggtgctttgtcgccgggaattattctgacggcggtgattacaggtctggtaaatatcagcaatacctacggtgcgattcggggcacggatgttttttatccgcagcagggcgcagggaatacgcgttatcgtcgtagctttgtggcgaccggatttatgacgctgataaccgtaccgctggcggtaattccattttcaccgtttgtttcatccattggtttattaacccagactggcgattacacgcggcgttcgtttatttatggcagcgttatttgcctgctggtggcgctggttcctgcactcacgcgactgttttgcagtatccctttacccgtgagtagtgcggtcatgctggtttcttatctgcctttactcttttccgcgctggtgtttagccagcaaataacgtttaccgctcgcaatatttatcgactcgcattgccgttatttgtcggcatatttttaatggcattaccgcctgtgtatctgcaagaccttccattaacgcttcgtcctctgctcagtaacggcttattggtcgggattttactggctgttcttatggataaccttattccgtgggaacgcatcgaataatttgttgaaaaaggattgataatgaagattgtcattgcgccagactcttttaaagagagcttaagtgcagaaaaatgttgtcaggcaattaaagccgggttttcgaccctctttcccgatgcgaactatatctgtttgccgatagcggatggcggcgaagggacggtggatgcgatggtcgccgcgacgggcggcaacatcgtgacgcttgaagtctgcgggccgatgggcgaaaaagtgaatgctttttatggccttaccggcgacgggaaaacggcggtgattgagatggcggcagcaagtggcctgatgctggtcgcgcctgaaaagcgtaatccgttgctggcctccagttttggtacgggggagttaattcgtcatgcgctggataacgacattcgccatattattctcggcattggcggcagtgcgacggtcgacggcggtatgggcatggcgcaggcgctcggtgtgcgtttccttgatgccgacggtcaggcgctggcggcaaacggtggtaatttagcgcgcgtggcaagcattgagatggatgaatgcgatccgcgtctggcgaattgccatattgaagtagcatgtgacgttgataacccgctggtaggggcacgcggcgcggcggcggtgtttggcccgcaaaaaggggcaacgccggagatggtcgaagaacttgaacaggggctgcaaaattacgcccgtgttttacaacagcaaactgaaattaatgtctgccagatggcgggcggcggcgctgcgggcggtatgggtattgcggcggcggtatttctcaatgcggatattaaaccgggcattgaaattgtgttgaatgcggtcaatcttgcgcaggcagtgcagggcgcagcactggtgattaccggggaagggcgcatcgactcgcaaacggcaggcggtaaagcgccgctgggtgtggcgtcggtggcgaagcagtttaatgtaccggtgattgggattgctggcgtattgggtgatggcgtggaagtggtgcaccagtacggcattgacgcggtattcagcattttgcctcgtctggcacctttagccgaagtgctcgccagcggtgaaaccaatctcttcaacagcgcgcgaaatattgcctgcgccattaaaataggtcagggaattaaaaactaacccttacctttaaagcggatgcgatttatatcgcataagagtgcagtactcatgccggatgcggcatgagtaccatatccttcctgaaaatcgcgcaaattctatatattgcagagatcatgtaggcctgataagcgaagcgcatcaggcaatgttacaaaaaaagccacggtataaaccgtggcaaaatccaacatagctaaaaataatcaggcgagtggtatgacttaaatctctacgtcgcggttacaatctttcgagtaaatatagctgaacgcttcaccacgccctacaccataaccagcctgtaaagaataagcgcccataaagatgtaatcgccttttttcaccgggatccagttattgtcgaggttataaaccccctgaccggaaagaatataggcaccgtgttcctgaacgtgtgtttcgatataaccgtggctggcacctggtgcaaaagagaggatatgcatgttcatatcaaaacctaactctttgggcagaaaatccagcagaataacatcgtccatgccttcataatgaatgcgttccagttcgctggcattgccagaaaccagccacggtgcatagccttctaccggaacatagcggcgcttatataaaaagatttggctgtcttcggcctgggcgttaacaaacgtcattaaggagcctggcgggcaataaagatagccaccttcgcttaaggcaaatgttttgccttcggctttggcagtgatatttccagagatcacatacaggaacgtttcaatgccttcgccaccgaagccctgttggttgccaccgttttgatgcagtgtgaccagataatcaacaaaagaggcacccagctttggcgtggagaggattgtcgcgtcacaattttcaaagcccggaataatattttttaccagaccatccggggttaacagtgcgaaattaccgtgtttaacaatcgcacggttagccagtaaatcttcgcggtaaccggtgacgttatttaaatatcccatttatgactccttatttctgccaggcaagttgataaagcatgagtgccaacgttttgaccccttcggcaaggtcggtaatattggtgcgttccgccgggttatggctgatcccgttgatgctggggataaaaatcatgcaggttggtacgcgaggcgcgaaaatttgcgcgtcgtgcccggcaccactgtgcatcacccggtaattcagtttttctctttcacacaattctgtcagggtggcgaccagctccttattcatcggcacgggttcttcgtccatccataaatcgatatcaataccaatgtccatttcatcgcaaatcgcccgcatgtcgttttctaactgttgggtgaaatcgcgcagcacggcagcgtcggtatgacgacaatcaatggtgaacgtggttttacccggcaccacatttaccgtattcgggcgcggctctactttgccaaaggtcagaaccagcggatcgcccatccttttcgctttttcgaccgactgatggcaaatgcgactgaaagcgtaaactgtatcacgacgataacccatcggcgtggtgcctgcatggtttgattcgccgttcagcgttaccgtataacgacgctgcccgacaattgcattcaccacgccaattgattgcccattactttccagcacacagccctgttcaatatgcagttcaacaaaggctttaatatcctgacgcggagttagtggggcgttcggaagagtaaatccgcaagccttcatcgcatcgacaaaactatttcctttggcatcacagatattccgcacgtcgtcaggattcgccagcccaaaaatatttttactgccccagaagacatacgggaagcggctgccttcttcttctgccatcgccaccacttcgaccgtacgtagcggcgcgccgtattgcgttttcagccagtcaattgccagccacgccgccagcgcgccgaattgcccgtcaaggttaccgccgttaaccacggtatcgatatgcgaaccgctcagaaccacttcctgtggatattcggtgccattcaggcgaccgtataaattccccacttcatcgaaacgtgtttccagcccgcttgctgccattctttttttaaattgctgctgggtttccagccattccggcgaataaagtaaacgggtcatcccacccgctgggtcagcgccaaaagaggaaagccagggcagcgtttcttctatagcttgacggaaatgtgtaatcataagaaagtcctgtctcaataattattgcgcaaagggatttttcgtttcgtatgacgtgttataaagcgcgtcggaaattaaatactggtaaatatcatcaacaatttcgatgccttcgacggcggctttgcgttgtttaatatcctgatcctgtccgggataataaacctgattaaaaccgggcgcgggggtaatggcatttaattcgcgcatggtctggctaagatgttgacggaataattcgctggaggagaaaaagttcggattaataactatatgtaattgccccaaattacgccctgcgtgtaaatcgtcatacatcgaactaacctgtcgcccgaacggtaagccgagtaagacgcctgagaggacgtcaatcatcatcatcaggccatacccttttggcccggcggcggggagcagagcatgtaccgcgaacggatcggttgttggtacaccgtttttatcgaccgcccaggtatccgggatagacatattacgcgagcgggcgtcgagcacttttccccatgcctgtacggtagtcgccatatcaaaggtaaggatctcgtcgccttctcccggcgcggcaaaggccagggggttagtaccgtagtaaatttccgcgccgccaaacggcaccaccattggatcggactggcacatcgaaatgccaatgaatccggcgcgggctgcctgctgcacaaaataagagattgcgccgctgtgacccatccggctgataccgaccaccgcaacgccattttgctgggcggttttgatggcatgttccatacccattttcgccgcgacctgtccggcggcattgtcggcatgtaaaattgccgagcacggcccggtttcctcaagacgaaactccggttcgcggttggtgccgccttttgaaatgcgttccgcgtagtattccacgcgcaccgcgccatgagagtggatccctctggcatcggcgtaaaccaatacttcagccacggttgcagcgtgctcacgttttaacccagcctggcagagtttattctcaattagctggtggagtgtttcccgactgattttcatctgtcttcctttttaacgacggtgtgaagcatgactgcaattaacatacagggaaaatatctggattatgtgatccagacaggcaaaaaaatatagttagaatttatttgataatccgctcacttttaacctgatttttaaaacaacaacgcttattaaaaaataatgagtaatagcctggtggttatttgaattcttttgttaataattcctgtgtgatattcatcaccttatttactcgttgtcatcgataccgtaatcgccacattaacactgctcgtgcaattgccatgggtgcaatttttaaggagttgttatgatccacgcctttattaaaaaagggtgttttcaggattcggtcagtttaatgattatttcacgaaaactcagcgaatcagaaaatgttgatgatgtttccgtaatgatgggtacgcccgccaataaagcgttattagataccacaggtttctggcatgacgattttaataacgccacgccgaacgatatttgcgtggcaattcgtagcgaagcggcggatgcggggatcgcgcaggcgattatgcagcagcttgaagaggcgctaaaacaactggcgcaggggtcaggcagcagccaggcgttgacgcaggtgcgtcgctgggacagtgcctgtcagaaattacccgatgccaatctggcgctgatttcagtggctggcgagtatgcggcggagctggcaaaccaggcgctggatcgcaacctcaacgtgatgatgttctccgataacgtcacgctggaagatgaaatccaacttaaaacccgcgcgcgggaaaaaggcttgctggtgatggggccggactgcggtacgtcgatgattgccggcacaccgctggcttttgctaacgtgatgccggaaggcaatattggcgtcattggcgcttccggtaccgggattcaggagctgtgttcgcagattgcgctggcaggggagggaattactcacgcgattggccttggcgggcgcgacctcagccgtgaagtgggcggcatcagtgcgctaacagcgctggaaatgctcagtgcagacgagaaaagcgaagtgctggcatttgtttcaaaaccacctgccgaagctgtgcgtctgaaaattgttaatgccatgaaagcaaccggcaaaccgacggtggcgctgtttttaggttataccccggcggtggcccgcgacgagaatgtctggtttgcctcctcgctggatgaggccgcacgcctggcttgcctgctttcacgcgtcacggcgcgacgtaacgcaatagcgcctgtcagcagcggatttatttgcggtttgtataccggcggtacgctggctgccgaagcggcgggattacttgccggacaccttggcgtggaagccgacgatacccatcaacatggcatgatgctggacgccgatagccaccagattattgacctcggcgatgatttctacaccgtcgggcgtccccatccgatgatcgacccaaccttacgcaaccagttaattgccgatctcggcgctaaaccgcaagtgcgcgtgttgctgcttgatgtcgtgattggcttcggtgcgaccgccgatcctgccgcctcgctggtgagcgcctggcaaaaagcctgtgccgcgcgtttagataatcaaccactgtatgccattgccacggtgacaggcactgaacgtgacccgcaatgccgctcgcagcaaatcgccacgctggaagatgcggggattgcggtcgtgagttcgctaccggaagccaccttgctggcggcagcgttaattcatccgctctcgcctgccgcacagcaacacacaccgtcattactggaaaacgtcgccgtgattaacatcggattacgcagctttgcgctggagctacaaagcgccagcaaaccggttgtgcattaccaatggtcgccagtcgccggtggcaataaaaaactggctcgtttattagaacgtttgcaataaggggttcccatgtttacatcagtggcgcaagccaatgctgcggttatcgaacaaattcgtcgcgctcgtccacactggctggatgtgcaaccggcttcttcacttatcagcgaactaaacgagggcaaaacactgcttcacgccgggccgccaatgcgctggcaggagatgaccggacccatgaaaggggcgtgcgtgggcgcatgtctgttcgaaggttgggcgaaagatgaagcgcaggcgctggcaatactggagcagggggaagtgaacttcattccttgtcaccatgtgaatgccgtcgggccaatgggcggtattacttctgccagtatgccgatgctggtggttgagaacgtgaccgacggcaaccgggcgtactgcaacctcaacgaaggtatcggcaaagtgatgcgttttggcgcttacggcgaagatgtcctgactcgccatcgctggatgcgcgatgtgttaatgccagtattaagcgcggcgctggggcgcatggagcgcggtatcgatctcacggcgatgatggcgcagggcattacgatgggcgatgagttccatcaacgcaatattgcttcctctgcactgttaatgcgtgcgctggccccacaaattgctcgcctcgatcatgataaacagcacatcgccgaagtgatggatttcctcagcgtgaccgatcagttcttcctcaacctcgcgatggcttactgcaaggcggcgatggatgctggcgcgatgatccgcgcaggcagcatcgtcacggcaatgacccgcaacggcaatatgttcgggattcgggtaagcgggctgggcgaacgctggtttactgcgcctgtaaacactccgcaaggtctgtttttcaccggcttctcgcaggagcaggcgaacccggatatgggcgatagcgcgattaccgaaacctttggtatcggaggtgcggcaatgatcgcagcgcctggcgtaacgcgctttgtcggtgcgggtggcatggaagcggcaagagcggtatctgaagagatggcggaaatttaccttgaacgcaatatgcagttgcagatcccaagctgggattttcagggcgcgtgcctggggctggacattcgtcgcgtggtagaaaccggcattacgccactcatcaataccggtatcgcccataaagaggcggggatcgggcagattggcgcaggcaccgtgcgggcaccgctggcgtgctttgaacaggcgctggaagcactggctgaaagcatgggtattggttgaggaacgcgcaatgacgatcatccatcctctgcttgccagtagtagcgcaccgaattatcgccagtcctggcggttagcgggagtgtggcggcgggcgattaacctgatgacggaaagcggcgaactgttaacgttgcatcgtcagggtagtggtttcggccccggaggatgggtgcttcgccgtgcgcaattcgatgcgttatgcggtggattatgcggcaatgaacgaccacaggttgtggctcaagggattcgcctcgggcgtttcacggttaaacagccacagcgttattgtttgctgcgtattacgccgcctgcgcatcctcaaccacttgcagctgcatggatgcaacgcgcggaggaaaccgggcttttcgggccactggcgttggcggcaagcgatccgctgcctgctgagttacgccagtttcgtcactgttttcaggccgcgctcaatggcgttaagaccgactggcggcactggctgggtaaaggccccggattaacgccgagtcatgatgacacgctgagcggaatgctgctggcggcctggtattatggcgctttagatgcgcgctccggtcgtccgttttttgcctgttccgacaatctgcaactcgttaccacagcggtgagcgtcagttatttacgttatgccgcgcaaggatatttcgcctcgccactcctgcactttgttcatgctctgagttgcccgaaacgtaccgctgttgcgattgattcgctgctggcgctggggcatacgtcaggggcagatacgctgctggggttctggcttggccaacaattattacaaggaaaaccatgaaaacactggttgtggctcttgggggcaacgccttactccagcgcggtgaggcgctgacggcagaaaatcaatatcgcaatatcgccagtgctgtacccgcgctggcacgcctggcccgttcttatcggttggcgattgttcacggcaacgggccgcaggtggggctgctggcattgcagaatctggcgtggaaagaggtagaaccgtatccgctggatgtgctggttgcggaaagccaggggatgattggctatatgctggcgcagagtttgagcgcacagccgcagatgccgcccgtgacgacggtgctgacgcgcattgaggtttcgcctgatgatccggcgtttttgcagccagagaaatttattggtccggtttatcagccagaagaacaagaggcactggaagcggcttacggctggcagatgaaacgtgatggtaaatatttgcgccgggtggtggcgtctccgcaaccgcgtaaaattctcgacagcgaagccatcgagttgttgctcaaagaggggcatgtggtgatttgcagtggcggcggcggtgtgcctgtgacggatgacggagcagggagtgaagcagtgattgataaagatctcgccgctgcgttgctcgccgagcagattaatgcagatggactggtgatcctcaccgatgctgatgcggtatatgaaaactggggaacgccgcagcaacgtgccattcgccatgccacaccggatgagttagcgccatttgccaaagccgatggttcgatggggccgaatgtaacggcggtgagtggttatgtcagaagccgtggtaaacccgcgtggattggggcgttatcgcgaattgaagagacgctggcgggcgaagcggggacctgtatttcgctgtagtcgtaggcattagacatttgtgcctgatgcgacgcttgacgcgtcttatcaggcctacaaccggtgccgcatccggcaattggtgcacaatgcctgatgcgatgcttgacgcatcttatcaggcctacaatgggtaccggatcggtaggccggataaggcgtttacgccgcatccggcaagaatagagcaccagttaaccgaacttactctgcgcccaaatcacgccgctggcatattccggcggcagcagcgggattaaggcttccagcgtcgcagtcagacgcgatgtgtcgctgtcggtcaaattcagatgccccactttacgccccggacggacttctttgtcgtaccagtgcagatgcaccagcggcagtttcagccagtcataattcacatcgctaccaatcagattgatcatcaccgacggattattcaccactggttgcggtaacggcagatcggtaatcgcccgcagatgcagctcaaactggctgatgctggcaccgttttgtgtccagtgaccgctgttatgcacacgcggtgccagttcgttgatcaacagaccttgcggggtgacaaaacactccatcgccatcacgcccacatagcccagctcctgcataatcgccgacagcatctcttcggcttgcgcctgctgctgtgcgttggcctgcggaaaagcgacgctggtgcgcaaaataccgtcctgatgcaggttatgcgtcagcggataaaacacggtgctgccatcaaagccgcgcgcgccaaccagcgacacttcaccagagaagttaatgccctgctcgacaatacattcgccgtaacactctgccggtaactgttcggtttcatttgcgcgtaaacgccattgaccgcgaccgtcataaccaccagtgcgacgcttaacaatcgccagctcacctaaacgatcaaacaccgcaggccactcgctgcgttcggcaagtaactgccacggtgcagtcggcaggtggagcttatcgaaaagctgcttctgagtcagacggtcagcaataatcgggaacacatcgcggttcacaaaggccggatggcgcgccagctcgcgggttaatgcggtttccggccagcgttctatctcagcggtaatcacgctttgttgaaaaggcaccgccgccggttcagcgtccagcccgactggccagacagcaatgcctaacggttcgcctgcctgacgcagcatacggcctaactgcccgttaccgaggacgcaaacctgtttcatgccgcacctcgcgggtccgggttttccagcacttcgtcggtctgggctttgcgccagtcattcagacgctggtgcagttctttatcatgagtcgcaagaatttgtgctgccagtaacgccgcgtttgccgcgccagctttaccaatcgccagcgtacccaccggaatgccgcgcggcatttgtacgatggagtagaggctatcgacaccgctcagtgcggcgctctgtactggcacgcccagcaccggcaccagcgttttggcggcaatcatgcctggcagatgcgctgcgccgcctgcgcccgcaataatcacctgataaccgttctcttcggcgctttcggcgaagctgaacagtttatcgggggtgcggtgagcagaaaccacttcaacgtggtgcgggacattcaggatttcgaagatttcggcggcgaactgcatggtagcccagtcgcttttggaccccatcacgatggcgacacgcgccggattattgcgggaagacatgcgtcttaaaactcctgtggtgcacaactctcggctttagagggcacagagaatagcacggaaagagagcaaggaaaacggttgcgtggctgtgaaatcagcaaagttgcgggttttttaaaacggaaaatgaatcagctcaacgtcatccgccgtgactttcaccattgaaccttccgtatgccaggcacccagtaccacgcgaaaagcaggttgctgattggcgataagttcatgcaccgccgggcgatgggtatgcccgtggatcagccattgcacctgatgtttttccatcgcactgaccaccgcgttttggttaacgtccatgatcgccagcgatttactgctgttggcttctttgctgttcgcgcgcattcgcgcggcaatgcgtttgcgcacaaacaacggcagggcgaggaatagcgtctgcagccagggtttgtggaccttggcgcgaaaagcctgataacccgcgtcatcggtgcacagcgtgtcgccatgcataatcaacacccggcgaccataaagttcgagcaccttttcttccggcaataacgtcatgccactttcacgggcaaagcgtttgccgagcagaaaatcacggttgccatgaatgaaataacagggaacgccggaatcggacaccgctttgatcgccgccgccatcttgcgatggagtgggttgggatcgtcgtcgccaatccatgcttcaaacagatcgccaagaatatacagcgcgtcggccttgcgggcttcccccgctaaaaaacgcagaaaaccggcggtgatcgccggttcttccacgcagagatgaagatctgcaataaagagtgtcgccacgattactcgctaacggtcacgctttcaatgataacgtcttcttttggcacgtcctggtgcataccgctacgaccggttgcaacacctttgattttgtctaccacgtccatgccgtcaaccacttcagcaaacacgcagtagccccaaccttgcaggctttcgccagagaagttcaggaagtcgttatcaaccacgttgatgaagaactgtgcagttgcagagtgcggagcctgagtacgtgccattgccagcgtaccacgggtatttttcaggccgttgttggcttcgtttttgatcggttctttggtggctttttgtttcatgcccggttcaaaaccgccgccctgaatcataaagccgttgataacacggtggaaaatggtgttgttgtaaaaaccttcgcggcagtagtccaggaagtttttaactgtttcaggtgctttatcgtcaaaagttttgatgacaatatcgccgtgattggtgtggaaagtaaccatttttgcatcctgttccgtttgattggtgcttcaacccagttcgggtcatatatagggtggtgttatagcataaccgcacgatcggatcatcacgcaatgtatgctgattcgcgcgggaaatatgggtattatacgcaactcaattacccacacatgtctaaacggaatcttcgatgctaaaaatcttcaatactctgacacgccaaaaagaggaatttaagcctattcacgccggggaagtcggcatgtacgtgtgtggaatcaccgtttacgatctctgtcatatcggtcacgggcgtacctttgttgcttttgacgtggttgcgcgctatctgcgtttcctcggctataaactgaagtatgtgcgcaacattaccgatatcgacgacaaaatcatcaaacgcgccaatgaaaatggcgaaagctttgtggcgatggtggatcgcatgatcgccgaaatgcacaaagattttgatgctttgaacattctgcgcccggatatggagccgcgcgcgacgcaccatatcgcagaaattattgaactcactgaacaactgatcgccaaaggtcacgcttatgtggcggacaacggcgacgtgatgttcgacgtcccgaccgatccaacttatggcgtgctgtcgcgtcaggatctcgaccagctgcaggcaggcgcgcgcgttgacgtggtcgacgacaaacgcaacccaatggacttcgttctgtggaagatgtcgaaagagggcgaaccgagctggccgtctccgtggggcgcgggtcgtcctggctggcacattgaatgttcggcaatgaactgcaagcagctgggtaaccactttgatatccacggcggcggttcagacctgatgttcccgcaccacgaaaacgaaatcgcgcagtccacctgtgcccatgatggtcagtatgtgaactactggatgcactcggggatggtgatggttgaccgcgagaagatgtccaaatcgctgggtaacttctttaccgtgcgcgatgtgctgaaatactacgacgcggaaaccgtgcgttacttcctgatgtcgggccactatcgcagccagttgaactacagcgaagagaacctgaagcaggcgcgtgcggcgctggagcgtctctacactgcgctgcgcggcacagataaaaccgttgcgcctgccggtggcgaagcgtttgaagcgcgctttattgaagcgatggacgacgatttcaacaccccggaagcctattccgtactgtttgatatggcgcgtgaagtaaaccgtctgaaagcagaagatatggcagcggcgaatgcaatggcatctcacctgcgtaaactttccgctgtattgggcctgctggagcaagaaccggaagcgttcctgcaaagcggcgcgcaggcagacgacagcgaagtggctgagattgaagcgttaattcaacagcgtctggatgcccgtaaagcgaaagactgggcggcggcggatgcggcgcgtgatcgtcttaacgagatggggatcgtgctggaagatggcccgcaagggaccacctggcgtcgtaagtaattgcgctattgccggatgcgagttttcgcatccggttatcgtctgcgccaccacaacattcccatcagtagcatccccggcaaccacacccacatcaattcagaaataatcacctgatgcccgtacggcgtggtgtaacgagacaatgcaaacggcgcgacttttatcacctgccagggagcgaaaaagcgttcatctgaccacggccacagccagccaacgcctttaccgccagtggttaccgaatccagcaagctgtgcgatagcaacgagacggttaaaaacagccagcagcgaatcagcccagccctgaaccatcggcgtccaataaacacacataacagcgggacaacaaacgcaaacaccagcgaatgggtaaacccgcgatgaccaaaaacattgccgtaagcaacgccaaatttaaacgacaatacgtcggcgtcgggcagcatcgccaggatgattccggcaaataacagacgcggagggatgactttcgaacccaaccctaaaccaatgcataggggaacggcggcgtgcgtaataacggttggcatgatggtcgcttcggcaaaatgtcgatgctatcagcatggatgaacggggcgtagagggcaaaagtctgaaaagagaaccggcctgttgatacaggccgggaaagggatcaggcaacaacctgtacgctgtgacctgcaaaactcactgtctgaccggcgacgattttgcagcgtttgcgcgtttcaaccgcaccgtcgactttcacctggccttcggcaatcgcgattttcgcctgcgcgccgctttcgctccagccttccagtttcagcaagtcgcacagctcaacgtgcggatgtttacctaaagaaaatgtcgccatgttactcatcctgtggatcatgatattcaacgcacgcctgtagcgtgttttcaatcagcgtggcaaccgtcatcgggccaacgccgccgggaacaggcgtaatgtatgaggcgcgtttagccgcgtcttcaaacacgacgtcgcccacaactttgccattttccagacggttgatgccgacatcaatcacaattgcgccttctttgatccagtcaccgggaataaagcctggcttgccaacggcaacgatcaatagatcggcattttctacgtgatgacgcagatttttagtgaagcggtgagtcactgtagtggtgcaacctgccagcagcagttccatgctcatcgggcggccaacgatattcgatgcgccaatcaccacggcgttgaggccgaaggtatcaatgttgtaacgctcaagcagcgtgacgataccgcgcggggtgcagggacgcagacgcggcgcgcgctggcacagacgaccgacgttgtaaggatggaaaccgtccacgtctttgtccggatgaatacgttccagcactttgacgttatcaatacccgccggtaacggcagttgaaccagaatgccatcgatggtgttgtcggcattcagcgtatcgataagctccagcagctccgcttcgctggtggtttccgggaggtcataagagcgggagacgaacccgacttcttcacaagccttgcgtttgcttgcgacataaatttgcgatgcagggttactacccaccagcacaacggccagtcctggtgcccgcagtccggctgcaatacgcgcctgaactttttgagcaacttcagagcgcacctgctgcgcaatcgttttaccgtcaataatctttgctgccatcagagagaggattccatctgttacgtagatcgaaggggatgcgcctattttgtcagaagcggggcgcgctgtcaggtttcgtttcagatttatcgcgtgaagcgacctcttgcgaaggtgaggcgcaccgtcgctgagactgaaagcttcatttttcgtccatgatggcgttgtaaatctggaactgatttatttccttgtctaaggattaagataatttaagaaatacctgacaatataaaaagaattttcagcctggtaatttaccgcttcaggtctatatttgtgttgaatatattttgcgcggaagtattcatctaacggggctctctattttttagaatagagtgcatattttcaattaagacattcttagaggataaaaaggaatttactactatcagtgtcttaaataaagtaatcggttatatacggatgtggagtcgataaatgagattgaaggaatatatatgaaattaagatttatttcgtctgcgctggctgccgcactattcgccgctacgggtagttatgctgccgttgtagatggcggtacaattcactttgaaggcgaactggtgaatgctgcctgttcagtgaatactgactcggcagaccaggttgtcacactcggtcaatatcgtaccgatattttcaatgctgttggtaatacctctgcattaattccattcaccattcagttgaacgactgcgatcctgttgttgccgctaatgctgccgttgcattttctggtcaggctgatgcaatcaatgataatttattggccattgcatccagtaccaatacaacaacagcaacgggtgtcggtattgaaatacttgataatacatccgcaattctcaaacctgatgggaatagcttctcaaccaaccagaacttgatccccgggaccaacgttcttcatttttctgcacgttataaaggcaccggtacaagtgcatcagcagggcaagcaaatgctgacgcgacttttattatgagatatgaataatcaaaaccacgttgttttgaattatatatcacgtcttataacaaagtaatgtaccggttgtctgaagcggtatggtggcaatgtaaatcgaaatcatgttcactttgtatcatgccgctttattaaatgaaaagggaatgatgtgttgtaagaaaccaaagcaatcatttctttatattccttatttttgccgtcaggaatacacaaggcgtattaactatgatgactaaaataaagttattgatgctcattatattttatttaatcatttcggccagcgcccatgctgccggagggatcgcattaggtgccacgcgtattatttatcccgctgatgctaaacagactgcggtatggattagaaatagccataccaatgagcgctttctggtcaattcgtggattgaaaacagcagcggtgtaaaagaaaagtcattcatcattacaccgccactgtttgttagtgaacccaaaagcgaaaatactttgcgtattatttacaccggtccaccgctggcagcagatcgtgagtctctgttctggatgaatgttaagacgatcccttcggtagataaaaatgcattgaacggcaggaatgttttgcaactggcgattttatcgcgcatgaaattatttctccgtccaattcaattacaagaattacccgcagaagcgccggacacactcaagttttcgcgatccggtaactatatcaatgttcataatccatcacctttttatgtcaccctggttaacttacaagtgggcagccaaaagttggggaatgctatggctgcacccagagttaattcacaaattcccttaccctcaggagtgcagggaaagctgaaatttcagaccgttaatgattatggttcagtaactccggtcagagaagtgaacttaaactaaccgaatcatctgacaatatcagagctaattatgaaaatacccactactacggatattccgcagaggtatacctggtgtctggccggaatttgttattcatctcttgccattttaccctcctttttaagctatgcggaaagttatttcaacccggcatttttattagagaatggcacatccgttgctgatttatcgcgctttgagagaggtaatcatcaacctgcgggcgtgtatcgggtggatctctggcgtaatgatgagttcattggttcgcaggatatcgtatttgaatcgacaacagaaaatacaggtgataaatcaggtgggttaatgccctgttttaaccaggtacttcttgaacgaattggccttaatagcagtgcatttcccgagttagcccagcagcaaaacaataaatgcatcaatttactgaaagctgtacctgatgccacaattaactttgattttgcagcgatgcgcctgaacatcactattcctcagatagcgttgttgagtagcgctcacggttacattccgcctgaagagtgggatgaaggtattcctgctttactcctgaattataatttcaccggtaacagaggtaatggtaacgatagctatttttttagtgagctcagcgggattaatattggcccgtggcgtttacgcaacaatggttcctggaactattttcgcggaaatggatatcattcagaacagtggaataatattggcacctgggtacagcgcgccattattccgctgaaaagtgaactggtaatgggagacggcaatacaggaagtgatattttcgatggcgttggatttcgtggtgtacggctttattcttctgataatatgtatcctgatagccagcaagggtttgccccaacggtacgtgggattgcccgtacggcggcccagctaacgattcggcaaaatggttttattatctatcaaagctatgtttcccccggcgcttttgaaattacagatttgcacccgacatcttcaaatggcgatctggacgtcaccatcgacgagcgcgatggcaatcagcagaattacacaattccgtattcaacagtgccaattttacaacgcgaagggcgtttcaaatttgacctgacggcgggcgattttcgtagcggtaatagtcagcaatcatcgcctttcttttttcagggtacggcactcggcggtttaccacaggaatttactgcctacggcgggacgcaattatctgccaattacaccgcctttttattagggctggggcgcaatctcgggaactggggcgcagtgtcgctggatgtaacgcatgcgcgcagtcagttagccgacgccagtcgtcatgagggggattctattcgcttcctctatgcgaaatcgatgaacaccttcggcaccaattttcagttaatgggttaccgctattcgacacaaggtttttatacccttgatgatgttgcgtatcgtcgaatggaggggtacgaatatgattacgacggtgagcatcgcgatgaaccgataatcgtgaattaccacaatttacgctttagccgtaaagaccgtttgcagttaaatgtttcacaatcacttaatgactttggctcgctttatatttctggtacccatcaaaaatactggaatacttcggattcagatacgtggtatcaggtggggtataccagcagctgggttggcatcagttattcgctctcattttcgtggaatgaatctgtagggatccccgataacgaacgtattgtcggacttaatgtttcagtgcctttcaatgttttgaccaaacgtcgctacacccgggaaaatgcgctcgaccgcgcttatgcctcctttaacgccaaccgtaacagcaacgggcaaaatagctggctggcaggtgtaggtgggaccttactggaaggccacaacctgagttatcacgtaagccagggtgatacctcgaataatgggtacacgggcagcgccacggcaaactggcaggccgcttacggtacgctggggggcgggtataactacgaccgcgatcaacatgacgttaactggcagctgtctggcggtgtggtcgggcatgaaaatggcataacgctgagccagcctttaggggataccaatgttttgattaaagcgcctggcgcaggcggtgtacgcattgaaaatcaaactggcattttaaccgactggcgcggctatgcggtgatgctgtatgccacggtttatcggtataaccgtatcgcgcttgataccaatacgatggggaattccatcgatgttgaaaaaaatattagcagcgttgtgccgacgcaaggcgcgttggttcgtgccaattttgatacccgcataggcgtgcgggcgctcattaccgttacccagggcggaaaaccggtgccgtttggatcactggtacgggaaaacagtaccggaataaccagtatggtgggtgatgacgggcaagtttatttaagtggtgcgccattgtctggtgaattactggttcagtggggagacggcgcgaactcacgctgcattgcgcactatgtattgccgaagcaaagcttacagcaagccgtcactgttatttcggcagtttgcacacatcctggctcataaaggaaattatcaataagataatctgcagattattattggcgatggcatgtttgtgtctggcaaacatatcctgggctactgtttgtgcaaatagtactggcgtagcagaagatgaacactatgatctctcaaatatctttaatagcaccaataaccagccagggcagattgttgttttaccggaaaaatccggctgggtaggtgtctcagcaatttgtccacccggtacgctggtgaattatacataccgtagttatgtcaccaactttattgttcaggaaactatcgataattataaatatatgcaattacatgattatctattaggtgcgatgagtctggttgatagtgtgatggatattcagttccccccgcaaaattatattcggatgggaacagatcctaacgtttcgcaaaaccttccattcggggtgatggattctcgtttaatatttcgtttaaaggttattcgtccctttattaacatggtggagatccccagacaggtgatgtttaccgtgtatgtgacatcaacgccttacgatccgttggttacacctgtttataccattagttttggtggccgggttgaagtaccgcaaaactgcgaattaaatgccgggcagattgttgaatttgattttggtgatatcggcgcatcgttatttagtgcggcagggccgggtaatcgacctgctggtgtcatgccgcaaaccaagagcattgcggtcaaatgtacgaatgttgctgcgcaggcttatttaacaatgcgtctggaagccagtgccgtttctggtcaggcgatggtgtcggacaatcaggatttaggttttattgtcgccgatcagaacgatacgccgatcacgcctaacgatctcaatagcgttattcctttccgtctggatgcagctgcggcagccaatgtcacacttcgcgcctggcctatcagtattaccggtcaaaaaccgaccgaagggccgtttagcgcgctggggtatttacgcgtcgattatcaatgaggtacggagaatgagaagagtactctttagctgtttctgcgggctactgtggagttccagtggatgggcagttgaccctttaggaacgattaatatcaatttgcacggtaacgttgttgatttctcctgtaccgtaaacacagcggatattgataagacggtagatttaggcagatggcctacgacacaactactgaacgctggcgataccacggcactcgtcccttttagcctgcggctggagggatgtcctccgggttcagttgcgattttatttacgggaacgccggcatccgataccaacctgctggctctggatgatcccgcaatggcacaaaccgtcgccatcgaattacgtaatagcgatcgctcccggctcgcactgggggaggcgagcccgactgaggaagtagatgcaaatggcaatgtcacactaaacttttttgccaattatcgagcgttagccagcggtgttcggccaggtgtggcgaaagcggatgcgatatttatgatcaattataattaatattatattaattcgtataatttggcgtagtcgataagctctacaattgaatgcaaacctagcttgccataaatattagatttatgcgcactaactgttttattgctaagtaataacttatcggcaatttctttattagataatccgctaaccagataacgtaatatggtcacttcacgattagatagcacagtgaccgttgaactattcgtactacatttattgctttttatatagttaagcgtttcgctgggaaaaaacgtgtatccggagaggatcatctgaacggcatgaaaaatatcattctgatcattgcatttactgacaaaaccgttagcaccagcttgtatcgctctgccagcataaaagcattctgatttcgatgataaaaataacactttcactgtgctctggatttgtttgatccttttcaggaaggtaaaaccgtctgttccgggcaagtctatatccataatgattaaatcaacaggacgggttcggagataatcgatggttatgcgataatcatccgttttcaggacaatctgcaattcactgtttttttgcaacagaacttcaatagacattctgatgataggatgagtatccataatgatcaccgacgttggtttcatagttaccagtctcataggagcggacaattttccgttaggtcgggaaattgtactttgatacatgaaaatacgggttttcttgattcagacgcgcagcggtgtgcgtttgtttgccgctatagcgaaataaatcagaaaatcagacgcggtcgttcacttgttcagcaaccagatcaaaagccattgactcagcaagggttgaccgtataattcacgcgattacaccgcattgcggtatcaacgcgcccttagctcagttggatagagcaacgaccttctaagtcgtgggccgcaggttcgaatcctgcagggcgcgccattacaattcaatcagttacgccttctttatatcctccataatttcagagtgggacatatttgggacattatcaccaaaaatgtcgtctattttcctcgcatgctctgtcaaatgattaggcgcaaggtgagcatacctacgaaccatttctatggactcccatccgcccatttcctgaagcactgataatgggacgcctgactgaatcagccagcttgcccaggtgtgtctgaggtcatggaaacggaaatcttcaattcctgcacgacgacaagctgatagccatgatgtcttgctgtcgatgcgcatcttcctgaccgcaggcgttgatgttccatctgctcgcttagccgccttggtatgtacaaacacccatttgtgatgcttgcctatttgatcacgcaacactttacaggcggtatcgttcagcgccacaccaatggcgcggtttgatttgctctcttctggattcacccaggcaactcgtcgctgcatgtcgatttgttgccattccagatttatgatgttcgactttctcagaccagttgccagcgcaaacttgacgacagatttcagtggttcggggcactcatcaataaggcgttttgcttcctccttttccagccatctgactcgcttgtttctgaccgctggtatcttgatgacaggcgctttttccagccacttccagtcgcgttctgcagcacggagaatggcctttatcatggcaagatgctttgcctttgtctgagttgatactggctttggttcataaacaggcagttctttacctttcctgatggcggcctgaactttctgtttccatatttctttcgtctttctgttatgcattctgcttacagcagagtaaatctttgcctccgagatatctttaagccttataccctcaaaatgttcaagccagaactcaatccggcttttatctgaatcgagagattttttatcagctttttcctcaagccatcttaggcaggcctcttcaaaagtgacatcaggtaaatcccctagcttttctactcgccagagttctgcttttcgcttgtcgtgcaactcctgagcttgccgtttgtcctttgtgccaagagattccttaattcgtttcccgcccgggagcgaatacgaggcataccatatttcatttctgcggaagagtgacattttctttcctctgttatgccatcacccgcgctcacctggacagtatgcagcggagactgaagcgccgcaatgcaggcttgccgtgttgtgaggtacccggatattatcgtgaggatgcgtcatcgccattgctccccaaatacaaaaccaatttcagccagtgcctcgtccattttttcgatgaactccggcaccatctcgtcaaaactcgccatgtacttttcattccgctcaatcacgacataatgcaggccttcacgcttcatgcgcgggtcatagttggcaaagtaccaggcatcttttcgcgtcacccacatgctgtactgcacctgggccatgtaagccgattttattgcctcgaaaccaccgagccggaatttcatgaaatcccgggaggtacgagtattgccggaagcgtggcctgtatccggatgcagagtcttatccgtggaaatcgaacgcgcattactggttggttaccaacttgtaccagaacatgcgggccaatgcgctggctgacgcggaattacggcgcaaggctgccgatgaactgacctgtatgacagcgcgaattaaccgtggtgagacgatacctgaaccagtaaaacaacttcctgttatgggcggtagacctctaaatcgtgcacaggctctggcgaagatcgcagaaattaaagctaagttcggactgaaaggagcaagtgtatgacgggcaaagaggcaattattcattacctggggacgcataagagcttctgtgcacaggacgttgccgcggtaacaggcgcaaccgtaatctgatcttacccagcaatagtggacacgcggctaagtgagtaaactctcagtcagaggtgactcacatgacaaaaacagtatcaaccagtaaaaaaccccgtaaacagcattcgcctgaatttcgcagtgaagccctgaagcttgctgaacgcatcggtgttactgccgcagcccgtgaactcagcctgtatgaatcacaactctacaactggcgcagtaaacagcaaaatcagcagacgtcttctgaacgtgaactggagatgtctaccgagattgcacgtctcaaacgccagctggcagaacgggatgaagagctggctatcctccaaaaggccgcgacatacttcgcgaagcgcctgaaatgaagtatgtctttattgaaaaacatcaggctgagttcagcatcaaagcaatgtgccgcgtgctccgggtggcccgcagcggctggtatacgtggtgtcagcggcggacaaggataagcacgcgtcagcagttccgccaacactgcgacagcgttgtcctcgcggcttttacccggtcaaaacagcgttacggtgccccacgcctgacggatgaactgcgtgctcagggttacccctttaacgtaaaaaccgtggcggcaagcctgcgccgtcagggactgagggcaaaggcctcccggaagttcagcccggtcagctaccgcgcacacggcctgcctgtgtcagaaaatctgttggagcaggatttttacgccagtggcccgaaccagaagtgggcaggagacatcacgtacttacgtacagatgaaggctggctgtatctggcagtggtcattgacctgtggtcacgtgccgttattggctggtcaatgtcgccacgcatgacggcgcaactggcctgcgatgccctgcagatggcgctgtggcggcgtaagaggccccggaacgttatcgttcacacggaccgtggaggccagtactgttcagcagattatcaggcgcaactgaagcggcataatctgcgtggaagtatgagcgcaaaaggttgctgctacgataatgcctgcgtggaaagcttctttcattcgctgaaagtggaatgtatccatggagaacactttatcagccgggaaataatgcgggcaacggtgtttaattatatcgaatgtgattacaatcggtggcggcggcacagttggtgtggcggcctcagtccggaacaatttgaaaacaagaacctcgcttaggcctgtgtccatattacgtgggtaggatcaaccagcataaatcaggctgcggctaaaatggcgcgggcaggaatcctggtcgttgatggtaaggtctggcgaacggtgtattaccggttcgctaccagagaagaatgggaaggaaaggtgagcacgaatctgatttttaaggagtgtcgccagagtgccgcgatgaaacgggtattgagggtatataaaagaacatcaatgggaacacaatgatgaaacaggtgagttgagttcaaactgtagtacaattctctccagtttgaacaggaaagaatatgctatgaacccttatatttatcttggtggtgcaatacttgcagaggtcattggtacaaccttaatgaagttttcagaaggttttacaaattaataataattatggccatctgttggtacaattatttgttattgtgcatcattctggttattagctcagacgctggcttatattcctacagggattgcttatgctatctggtcaggagtcggtattgtcctgattagcttactgtcatggggatttttcggccaacggctggacctgccagccattataggcatgatgttgatttgtgccggtgtgttgattattaatttattgtcacgaagcacaccacattaaaataatttgtttctaaacgactaaaatatggaggctcttatatttatatgagcctcgttttatgctttttgttaatgtctttattttttatgtattcttttgtgctttcaagattatggcgtaagaaaattgcaatacgattattgttgtatattcaagataatgtgaccttaattgtctttttaaataaaaaataaacaaaaattatatcccaccactaaggtttataaaagcatacgttagcaggtgtcaccatgaaaaaagccatagcatatatgcgattttcatcaccaggtcagatgtctggcgactcattaaaccgacagagaagacttattgctgaatggttaaaggtaaatagtgattattatcttgataccataacatatgaagatttaggattaagtgcattcaaaggaaagcatgcacaatcaggagctttttcggaatttttagatgctatagagcatggttatatattgccaggaactacattgttagttgaaagtctggacagactttcaagagaaaaagtcggtgaagcgattgaacgtctgaaattgattttgaatcacggtattgatgttataactctttgcgacaatacagtctataatattgactctttgaatgagccatattcattaataaaagccatacttatagcacaaagggcaaatgaagaaagcgagataaagtcaagtcgggttaaattatcatggaagaaaaaacggcaggatgcactggaatcaggtacgattatgacggcgtcttgtccgagatggctctccttagatgacaaaagaacggcttttgttccagaccccgacagggtgaaaactattgagctaatttttaaactcaggatggaaaggcgctcattgaatgcaatagccaagtatttaaatgatcatgctgtaaagaatttctcaggaaaagaaagtgcatggggaccttctgtaattgaaaaattattagcgaataaagctctgataggtatttgcgtaccttcatatcgtgcaagagggaaagggataagtgaaatcgctggctattatcccagagtcatatcagatgatttgttttacgctgtacaggaaattcggttggcaccttttggtattagcaatagtagcaagaatcctatgctaataaatctacttcgaacagttatgaagtgtgaggcttgtggtaataccatgattgttcatgcggtatctggaagtttgcatggctattatgtttgtccgatgagaagattacatcgatgtgacaggccatcaataaaaagagatttggttgattataatatcattaatgaattgctttttaattgtagcaaaattcaaccagttgaaaacaagaaagatgctaatgaaactttagagttaaaaattattgagcttcagatgaaaattaataatttaatcgttgcattgtctgtcgcgcctgaagttaccgctatagcagagaaaataagactattagataaggaattacgaagggcttcggtatcattgaaaactttgaagagtaaaggtgtaaattcattcagtgatttttatgctattgacttaaccagtaaaaatggacgagagttatgccgtacacttgcctataaaacattcgaaaaaatcataattaatacggataataaaacctgtgatatctattttatgaatggcattgtttttaaacactatcctttaatgaaagtaatatccgcccagcaggcgataagtgctctcaaatatatggttgatggtgagatttatttctaaataatgatctcggattttaagttatgctatggtgataaagtgcaagacagaattaattatctttgacgaaacttaatgggtaattactttgtttgctcccacaagcgagttttgtacggctgtattggggtagtaaatgagctatacaatcttaatcatttgttaggtgagaactcttggtcgcagattcaaatactgaaaatacgtgacaaattattatgagcaaaatggtgtatgtcacgtattttgaatggtaggttaaaaaataacaccgactttcgtaggtgttactaataataaagcagagtttttagatagtatcaatgtgctttgtgtatattgtggcaaataattgggttgggggtacaattgtgattgcttttgcatgaacattgcgcctttatgcataatgagataaaggaatatcaaataaaataacgataggtcataacaaagaggtttttatgaaaacacttatcgtttcaactgtattggcattcataacattttctgcgcaggctgcagcatttcaggtcactagtaatgaaataaaaacaggagagcaacttacaacgtctcatgtcttttctggatttgggtgtgaaggtggtaatacatcgccctcattaacctggtctggtgttcctgaaggtaccaaaagctttgccgtaactgtatatgatccagatgcacctacaggcagtggttggtggcattggactgttgttaatattccagcaacagtaacatatttgcccgttgatgcagggagacgtgatggaacaaaactgccgactggtgctgttcaaggccgaaatgattttggctatgctgggtttggtggcgcatgtcctcctaaaggagataaaccacatcattaccagtttaaagtatgggctctaaaaactgaaaagattcctgtagattctaactccagcggagcgttagttggttatatgcttaatgctaataaaatcgcaaccgctgagataacaccagtttatgagataaagtagggtgagagtatgctggcaagaggtaagactaacttaaagatcgaagaaatacggatgcataaacatcatgagattcatagggttaagcctcttatgccagctttgtgtcgtatccgtcagggaaagaaagttatcaattgggagacgcatactttaactgttgataataatcaaataatattatttccttgtggttatgaattttatattgagaattatcctgaagcagggctttatcttgcagaaatgctttacttacccattgatttaattgagagtttccaaaaactttatacggtaactgatcaaatacgtaacaaaacaagtttctttttacctcagaatcctgagttaatatattgttgggagcaactaaaaacatctgtttcccgaggcttctcaactaaaattcaggagcacttagcaatgggcgttctactttcgttaggagtgaatcatgttaatcatttacttttatcatatagtaaacaatcattgataagtcgttgttataacctgctgctatccgaacccggcacaaaatggacagcaaacaaggttgctcgatatctctacatttctgtttctacattacatcgccgtctagcaagcgagggggtaagtttccaaagtatactggacgatgtgaggttaaataatgcgttgtctgctatacaaacgacggtaaaacctataagcgagattgccagagaaaatggttataagtgtccttctcgttttactgaaagatttcataatcgttttaatataacaccaagagagataagaaaagcttccagagagtaaaagtgttttaagaaggagcaattctatcgattttgattttgggaaatcaacacggcataattatgtcaccggagcctgaacaactccggtgacttctgcgctaaacggggacgtttatgcgcacatacaatccaaactctcttctcccttcacagatgcagaaatgcacctgcaattctttgcatctagcgtttgacctctgcggaggggaagcgtgaacctctcacaagacggcatcaaattacatcgcggcaacttcaccgctatcggtcggcagatccagccttatctggaggagggcaaatgctttcgcatggtgcttaaaccgtggcgtgagaaacgcagtctttcccagaatgcactcagccacatgtggtacagcgaaatcagtgaatacctcatcagcaggggtaaaacgttcgccactccagcttgggtaaaagatgctctcaaacacacatatctcggttatgaaaccaaagacctggttgatgtcgtaaccggtgatatcaccactatccagtcgttacgccatacctccgatcttgataccggagagatgtatgtcttcctgtgtaaggttgaagcctgggcgatgaatattggttgccacctgactattccacagagctgcgagttccagctgctgcgcgacaagcaggaggcgtaatggctacaccgcttattcgtgtcatgaacggacacatctacagagtaccaaatcgtcgtaagcgtaaacctgagctgaagccatccgaaataccaacactgctcggatataccgccagcttggttgataaaaaatggttgcgactggcagcaaggaggagtcatggctgatttgagaaaagcagcgcgtggtcgggaatgccaggtaagaatccctggcgtatgtaatggcaaccctgaaacgtctgtactggcacatatccggctgactggattgtgcggcaccggtacgaaaccgccagacctgattgccaccattgcatgttctgcctgccacgacgaaatcgaccgccgcacgcattttgttgacgctggatatgcaaaagaatgcgcgctggaaggtatggcgagaacacaggttatctggctgaaagagggggttattaaggcgtgaatacctacagcatcacattaccctggcctccgagcaataatcgctattaccgccataatcgcgggcgcacgcacgtcagcgcagaggggcaggcataccgcgataacgtcgcccgaatcattaaaaacgcaatgctggatatcggcctggctatgcctgtgaaaatccgcattgagtgccacatgccggatcgccgtcgccgtgacctggataatctgcaaaaagccgcttttgacgcactcactaaagcaggtttctggctggatgatgctcaggtcgttgattaccgcgttgtgaagatgcctgttaccaaaggtgggaggctggaactgaccatcaccgaaatggggaatgaatgatgtttgagtttaatatggcagaacttcttcgccaccgctgggggcgtctgcgcttatatcgtttccccggttctgttttgaccgattaccgaatactgaagaattacgccaaaaccctgacaggagcaggagtatgaagtcagagataacaatcaactaatactgttttgttgatttttgcttgtaattggcgttctggtctgatttttgtggagtaagttgatgcgtgatattcagatggttcttgagcgttggggagcgtgggcggctaataatcatgaagatgtgacctggtcgtccattgccgccggttttaagggattaattacttcaaaagtaaaatctcgcccgcaatgttgtgacgatgacgcgatgatcatttgcgggtgcatggcccgtctgaaaaagaacaacagcgatttgcacgatttattagtagattattatgtagtcggtatgacattcatgtcactggcaggtaagcattgctgctctgatggttatatcgggaaaaggttacagaaggctgagggcataattgaagggatgttaatggcattagatatccggttagagatggatatcgttgttaataactctaattaatatgccaattgtttactaaaaattattaaaaatggggcgttgagacgcccccaaaaataaagggtaatatataacagaaggtttatatagttagaagcaaggttgtgcttctaaaggaagtggcttgagggagccacttatatgttggggaggcaacgcctcccgcaacatatctttttcgtaatcagattagaactggtaaaccagacctacagcaacgatgtcatcagtgcttacaccgagtgctttagggaaggtgcgaataagcggggaaattcttctcggctgactcagtcatttcatttcttcatgtttgagccgattttttctcccgtaaatgccttgaatcagcctatttagaccgtttcttcgccatttaaggcgttatccccagtttttagtgagatctctcccactgacgtatcatttggtccgcccgaaacaggttggccagcgtgaataacatcgccagttggttatcgtttttcagcaaccccttgtatctggctttcacgaagccgaactgtcgcttgatgatgcgaaatgggtgctccaccctggcccggatgctggctttcatgtattcgatgttgatggccgttttgttcttgcgtggatgctgtttcaaggttcttaccttgccggggcgctcggcgatcagccagtccacatccacctcggccagctcctcgcgctgtggcgccccttggtagccggcatcggctgagacaaattgctcctctccatgcagcagattacccagctgattgaggtcatgctcgttggccgcggtggtgaccaggctgtgggtcaggccactcttggcatcgacaccaatgtgggccttcatgccaaagtgccactgattgcctttcttggtctgatgcatctccggatcgcgttgctgctctttgttcttggtcgagctgggtgcctcaatgatggtggcatcgaccaaggtgccttgagtcatcatgacgcctgcttcggccagccagcgattgatggtcttgaacaattggcgggccagttgatgctgctccagcaggtggcggaaattcatgatggtggtgcggtccggcaaggcgctatccagggataaccgggcaaacagacgcatggaggcgatttcgtacagagcatcttccatcgcgccatcgctcaggttgtaccaatgctgcatgcagtgaatgcgtagcatggtttccagcggataaggtcgccggccattaccagccttggggtaaaacggctcgatgacttccaccatgttttgccatggcagaatctgctccatgcgggacaagaaaatctcttttctggtctgacggcgcttactgctgaattcactgtcggcgaaggtaagttgatgactcatgatgaaccctgttctatggctccagatgacaaacatgatctcatatcagggacttgttcgcaccttccttagtgaagtcatttttgtcaagcaggttgattttgtaatcaacgaaagtagacatatttttgttgaagtaataggttgcacctacatcaacatatttgactaagtcctgatcgccccatactccaagatccttacctttagattgcaggtaagcaacggacggacgcagaccgaaatcgaactgatattgtgcaacagcttcgaagttttgggctttattagcaacgaagtgatcagcaaatacagtcatattctgggtttcagaataggtagtggccaggtaaatgttgttagcgtcatatttcagacctgcggcccaaacttctgcatttttaccggaagcaaatacttcaggaagaactttccctgcattaacttgagtgtcggtacgatcagatttcgcataagttgcaccgataccgaatccttcgtattcataggtagcagagaaaccgaagccatcaccgttaccttcagtgtagttatcgaaatcgctacgatcgtttttgccttggtactgagcagcaaagttcagaccatcaaccagaccaaagaagtcgttgttacgataggttgcaacaccagttgcacgttgagtcatgaacacgtcggtttgagtccaagtgtcaccaccgaattctggcaggacgtcagtccacgcaccgatgtcgtatgctacaccgtagttacggccgtaatcgatggagccgtagtcaccgaatttcaggccagcgaaggcaagacgggttttatctttggaggaaccttgagattcagcgcggttgcctttgaattcatattcccactgaccgaaaccagtcagttgatcgttgatttgggtttcacctttgaagccaagacgggcataagtagtatcaccatcatctgcatcattagaggagaagtagtgcttagcattaactttcccgtacagatccagcttgttactgtctttattataaatttcagctgcctgagcagacatcgccattagtactgatgcagctacagcagaaattgccactgttaattttttcatcgtgagccctttttttgaactattattaaaaaatgatgtcactgcgcgataaatattcatctaatcaatgtgattatttcaagatgtaagttttggtttctcgtttgatttgtgaagtagatctctatttttatctgaacttttttctatcgaatcctattcatggctcttggctgaataaaaataaatctattagccaatttatattaacggctgttatttataagtgctctataatttgaaggttcaatttaaaccggctaaaaataacactggaaattattttttggttatttgttgagatttgcttatgtatttgtagtggtgttttcaatactcggtagcattctctcaaatatcatttagtggtttacgtacgtaaaaaattggttatgctgttaagagtggttacttcgtcacacagcttaaacccgccgtcgagcgggtttttccattttttgagtctcgatattagctgataacccaatacctgagttattcactgactccgagtctgttacgtttcgtagtattccctcaatttacacccgctttgtctgcgaggtggggttatgaaatccatggataagttaacaacgggtgtcgcctatggcacctcagcaggtagtgccgggtactggtttttacagctgctagataaagtcactccctcacagtgggcagcaataggtgtgctgggtagcctggtatttggcctgctgacgtacctgacaaacctttatttcaagattaaagaagataagcgcaaggctgcgagaggtgaataatgcctccatcattacgaaaagccgttgctgctgctattggtggcggagcaattgctatagcatcagtgttaatcactggcccaagtggtaacgatggtctggaaggtgtcagctacataccatacaaagatattgttggtgtatggactgtatgtcacggacacaccggaaaagacatcatgctcggtaaaacgtataccaaagcagaatgcaaagcactcttgaataaagaccttgccactgtcgccagacaaattaacccgtatatcaaagtcgatataccggaaacaacgcgcggcgctctttactcattcgtttacaacgtgggtgctggcaattttagaacatcgacgcttcttcgcaaaataaaccagggcgatatcaaaggcgcatgtgatcagctgcgtcgctggacatacgctggcggtaagcaatggaaaggcctgatgactcgtcgtgagattgagcgtgaagtctgtttgtgggggcaacagtgagcagagtaaccgcgattatatccgctctgattatctgcatcatcgtcagcctgtcatgggcggtcaatcattaccgtgataacgcaatcgcctacaaagtccagcgcgacaaaaatgccagagaactgaagctagcgaacgcggcaattactgacatgcagatgcgtcagcgtgatgttgctgcgctcgatgcaaaatacacgaaggagttagctgatgcgaaagctgaaaatgatgctctgcgtgatgatgttgccgctggtcgtcgtcggttgcacatcaaagcagtctgtcagtcagtgcgtgaagccaccacggcctccggcgtggataatgcagcctccccccgactggcagacaccgctgaacgggattatttcaccctcagagagaggctgatcactatgcaaaaacaactggaaggaacccagaagtatattaatgagcagtgcagatagagctgaccatatcgatgggcaactcatgcaattattttgagcaatacacacgcgcttccagcggagtataaatgcctaaagtaataaaaccgagcaatccatttacgaatgtttgctgggtttctgttttaacaacattttctgcgccgccacaaattttagctgcatcgacagttttcttctgcccaattccagaaacgaagaaatgatgggtgatggtttcctttggtgctactgctgtctgtttgttttgaacagtaaatgtctgttgagcacatcctgtaataagcagggccagcgcagtagcgagtagcatttttttcatggtgttattcccgatgctttttgaagttcgcagaatcgtatgtgtagaaaattaaacaaaccctaaacaatgagttgaaatttcatattgttaatatttattaatgtatgccaggtgcgatgaatcgtcattgtattcccggattaactatgtccacagccctgacggggaacttctctgcgggagtgtccgggaataattaaaaacgatgcacacagggtttagcgcgtacatgtattgtattatgccaacaccccggtgctgacacggaagaaaccggacgttatgatttagcgtggaaagatttgtgtagtgttctgaatgctctcagtaaatagtaatgaattatcaaaggtatagtaatatcttttatgttcgtggatatttgtaatccatcggaaaactcctgctttagcaagattttccctgtattgctgaaatgtgatttctcttgatttcaacctatcataggacgtttctataagatgcgtatttcttgagaatttaacatttacaacctttttaagtccttttattaacacggtgttatcgttttctaacacaatgtgaatattatctgtggctagatagtaaatataatgtgagacattgtgacgttttagttcagaataaaacaattcacagtttaaatcttttcgcacttgatcgaatatttctttaaaaatggcaacctgagccattggtaaaaccttccatgtgatacgagggcgcgtagtttgcattatcgtttttatcgcttcaatctggtctgacctctttgtgttttgttgatgatttatgtcaaatattaggaatgttttcaattaatagtattggttgcgtaacaaagtgcggtcctgctggcattctggagggaaatacaaccgacagatgtatgtaaggccaacgtgctcaaaccttcatacagaaagatttgaagtaatattttaaccgctagatgaagagcaagcgcatggagcgacaaaatgaataaagaacaatctgctgatgatccctccgtggatctgattcgtgtaaaaaatatgcttaatagcaccatttctatgagttaccctgatgttgtaattgcatgtatagaacataaggtgtctctggaagcattcagggcaattgaggcagcgttggtgaagcacgataataatatgaaggattattccctggtggttgactgatcaccataactgctaatcattcaaactacttaacctgtgacagagccaacacgcagtctgtcactgtcaggaaagtggtaaaactgcaactcaattactgcaatgccctcgtaattaagtgaatttacaatatcgtcctgttcggagggaagaacgcgggatgttcattcttcatcacttttaattgatgtatatgctctcttttctgacgttagcctccgacggcaggcttcaatgacccaggctgagaaattcccggaccctttttgctcaagagcgatgttaatttgttcaatcatttggttaggaaagcggatgttgcgggttgttgttctgcgggttctgttcttagttgacatgaggttgccccgtattcagtgtcgctgatttgtattgtctgaagttgtttttacgttaagttgatgcagatcaattaatacgatacctgcgtcataattgattatttgacgtggtttgatggcgtagatgcacgttgtgacatgtagatgataattattatcattttgtgggtcctttccggcgatccgacaggttacggggcggcgacctcgcgggttttcgctatttatgaaaattttccggtttaaggtgtttccgttcttcttcgtcgtaacttaatgtatttatttaaaataccccctgaaaagaaaggaaacgacaggtgctgaaagcgagctttttggcctctgtcgtttcctttctctgtttttgtccgtggaatgtgcaatggaagtcaacaaaaagcagctggctgacattttcggtgcgagtatccgtaccattcagaactggcaggaacagggaatgcccgttctgcgaggcggtggcaagggtaatgaggtgctttatgactctgccgccgtcataaaatggtatgccgaaagggatgctgaaattgagaacgaaaagctgcgccgggaggttgaagaactgctgcaggccagcgagacagatctccagccagggactattgagtacgaacgccatcgacttacgcgtgcgcaggccgatgcacaggagctgaaaaatgccagagactccgctgaagtggtggaaaccgcattctgtactttcgtgctgtcgcggatcgcaggtgaaattgccagtattctcgacgggatccccctgtcggtgcagcggcgttttccggaactggaaaaccgacatgttgatttcctgaaacgggatatcatcaaagccatgaacaaagcagccgcgctggatgaactgataccggggttgctgagtgaatatatcgaacagtcaggttaacaggctgcggcattttgtccgcgccgggcttcgctcactgttcaggccggagccacagaccgccgttgaatgggcggatgctaattactatctcccgaaagaatccgcataccaggaagggcgctgggaaacactgccctttcagcgggccatcatgaatgcgatgggcagcgactacatccgtgaggtgaatgtggtgaagtctgcccgtgtcggttattccaaaatgctgctgggtgtttatgcctactttatagagcataagcagcgcaacacccttattccagctggcttcgtggctgttttcaacagtgatgagtcatcgtggcatctcgttgaagatcatcggggtaaaacggtttatgacgtagcgtcaggggacgcgttatttatttctgaactcggtccgttaccggaaaatgttacctggttatcgccggaaggggagtttcagaagtggaacggtacagcctgggtgaaagatgcagaagcagaaaaactgttccggattcgggaggcggaagaaacaaaaaacagcctgatgcaggtagccagtgagcatattgcgccacttcaggatgctgtagatctggaaatcgcaacggaggaagaaacctcattgctggaagcctggaaaaaatatcgggtgttgctgaaccgtgttgatacatcaactgcacctgatattgagtggcctacgaaccctgtcagggagtaatcattgggattatgccgcagcacgtcttaagcaagaacatgctgcggttggatgctatttttttcctgaagcggaaaacattactacagtaccttgaaccttggttttaacattctcgaaatgctctgagagtatatgtgttaagccttcttcggaatcttttgtgtttgaaaagatgcctttctgattgtaaatgcgcatcagtttttgaccgaagctattgtgcacaactccatcgccaagaattgtggctccgtatagagttccatcgtcagttaaggcctgcgccgcattgcgtattacacagctttttgtagatatatttccaggcaggcagtgaagaaggtaagacatggaaatggaatcaaattgaccatgtaacgccgcgggataaggttcaaaaacatcatggctaattttatgtttaatttttgattccccagcccttgtagatgccgcgttcaggctagcttcgttcaaatccattaaagatatcagactactctcaggtacgtgagtaaggtaaaacccagttccaacaccaatatccagatggttgttacctaaatgttccagaaagtgtggaagaaggtgttcctttgtaggacatccccatgcaagccgatttgatactcccaaaacccaccagtcataaagctttagggtaagtggtgtgtaaattctagccccatcatctgtgtttttttattaatttcaccatgttatagttttatttgtgaattaaatcaattatggcaatgaattacaaggggttaaatgctgccgcagcatagcgatattgaaatagcctggtatgcttcaatacagcaggagccgaatggctggaagaccgtcaccacacagttctacatccaggaattcagtgagtatattgcgccactgcaggatgctgtagatctggaaatcgcaacggaggaagaaagatcgttgctggaagcctgaaaaaagtatcgggtgctgctaaaccgtgtggacacttccgtagcaccagatatcgagtggcttattcaaccataataaacagtatgtatatcataggttattaattgtgagttttttcggtgtgttatttgtttgtttgatgttatgcttttgcgccccaaaaggttgtttagatgtattttatcaattgattttcaatatcgtttaataaagaaaaattaagcaagctggatgttggttttttgttaattgaatggttctaataatgtttttttactgttgttgaatgtgacttgataagaaatgcaagtaaaaatgatactctttttattttaaattcaaacggttgacatatatatagcaagaggtttcaggtgcgttgtagtgagtttatgttaataaaaagcatagtaagcgttgaaaaatgtaactttgaaataagttagaataaaaaacaacatacatataataatttaatcttaaatgaaatttattaaaatttgcaaactataattttgtgtataaaaatataaatgcacatcatcctgattatgattgtgtatttaattggttgttatttgactactatcaacttgttttaattttatgataggtgcaagatggattatgtttgctccgtagttttcatctgtcaatcatttgatttaattataaacaggagagttatctcgttcaaaaaaaattcattgtttattgtaagcgacaaaattagaagggagttaccagtatgcccctctaaactaagaattgttgatatagataagaaaacatgtttatccttttttatcgacgtgaataatgagctgcctggcaaatttactcttgataagaatggctatattgctgaagaggaacctccattatcgcttgttttttctctgtttgaagggattaaaatagcagactcacactccctttggttaaaagaaagactatgtatatccttacttgccatgttcaaaaaacgcgaaagtgtaaattcatttatactaacaaatataaatacatttacctgtaaaattactggaataatcagttttaatattgagcggcaatggcatttaaaagatattgcggaattgatttatacgagtgaaagtttaataaaaaaaagattaagggatgaaggaacgtcatttactgaaatattgagagatactaggatgaggtatgcaaaaaaactcataacttcaaactcttattctatcaatgtcgtagcccagaaatgtggctataacagtacttcatatttcatatgtgcatttaaagattattatggtgtcacgccatctcattattttgagaaaataatcggcgtcacagatggaataaacaaaacaattgactgataatgtttattacaagttgtctacatgttaattataatattatacagcgttttttttgatgtgatattctggaaccattaatttgtaattgggttgctgtcgcctattttatacatactataattgatggttttctatgtgatttagttaataaccttctgggtttattttaagggttaattgttacattgaaatggctagttattccccggggcgattttcacctcggggaaattttagttggcgttcttaaaatgtgtacttaagaccagcagtagtgatgaagttatagttttctatacctgctccatttttgctgtagtctgaagtgttattattgtgatcataaagtgaagtattaccttttttattcgtaacccgattccatgcgccttcaacataaacttttgcgttaggtgtgacgtaataacctgcattgactgcaacagaatagtaattttggtctttgaccttactgcgataagtgattctttttcccgggtcatagtgttcatcgttatcagatgattccacccagccgctgtatttaaatgtgccaccgagttcaaaatcttcataacgataacttccagtcaagccaatgtagggcattttaaaacgttgtttgtagccgattgctctttctccattcgggaaggagccgatatcatctctgaatccctcctcagaactgtagatataggaaccacctctggctgtaaagctataacggctttcctgatatccggccatgagtcccaggcggtaattgggttcgttgaggagccagcctttgatattcagatcaaattcgttggcataattgagttgtgtatcagggtgtctactttcatccgtccaggttccggggttactggaatccatccagtcctgatcgaccatattgccacctcggctgccgagagttgtccagccagcagccccgatagatatctggggcatcaaatcccaattaattgcacctttaataattgcagcgttattgaatttccagtcgagttgactgacttttcggcctccttcttcggctagataaacacgctcttttgtttttccgctcagagttccaagactaatgtccgcatttatgttgtcaggagtaaacgataaagtctcggtagaagcaaaagagctgatcgcaataggggttgtcaggactattcccagaagtttcgcccgcataaaagttctccattcaatcgttttaatgattgaatatgtattttttatatctaacttaatgagtcaattacatattgctccactgtttatattttgtttagtattgaatgattatcacaatgcgctatctgtttttggtttaattatctgttattgtttcatatttcggttttactgtgtggtttttttatgcttttgtggtgcttttatctatttaagtgccatgcctttagaggcatataagcgaaaatagcatgaggtttatcctcaattactatgttttttagtacaaaaaagagggacaaaactgagacacataaggcctcgcaatggcttgcaaggctttacatgttttgaggtagtgggacgtgtgagcgcagagatggcgcggtaagttgttgacttaaaatgtcgttctaggaacttctaagtcgtgggccgcaggttcgaatcctgcagggcgcgccatttcttcctcatttatgcccgtcttatccgtttccgctttgcccttcaccacatcactttttgtcgctgtttggcgagataattcaacggtgtcaggccgtaaaacgccttaaaaacagagataaagtacgacgtgctgctatagccacataattgcgccacctgagtgatatttttgttatccatcaataacatctgtacggcgtaacgcatacgacactctgtgacaatctggctatagctggtattttcgttttttaatttctttttgagcaggctggggcttaaacatagcgaactggcgacaattcgcagattccagtaatgctgaatatcgctttgaataatgcggcagacgctgtcgcggacgctgctgcgtaagatatacatcagtagggcaataaaccgcgattgctcaagaaagttagacaatacggtaaaaagcaatgcgcgcgtcaactccgcttcgcagggtctgctgggttgctgcttgctgtggttggcggctagccggaacacttccggtgtacggctatgacaagcgataaccggggttgccagccgcgaccagggctttacacaggttaagttcttatttaaaaacaacagataatcgttgatgatgttacggttgatgtgggtgattaatacgtgatttaacgttgagagttcaatgacgttattgttgcacgcgaaggcggccaggtagtttttcggaagggtaaacgtagcatggttattgacgcttacctctacctctttttcggtcaggatcaccacgcaaggttcactgctgctcaattgcatttcgcactcctcagatatcagaaactccgctcaaaggatctatgcttcctgcatgagtgatcggcccgttcgccgataacgatcttctttctttagcacgctttttagcaattaatcttgatggaattctgatgagagcgaaagaggtaagccaggtcgtacccgacttacctggaggagatttaatactcgagaatgccgtgcgcgacgggcaaatagcgcagagagaaatagagagtgtctttaccgcaagaggaacgtttcgctaacagcgaggcaatttctgcgtccggtttcggtttcgctgtaaaggttttgcctttgccggcgacaaaaagttcataaacaacgccgctggcaggggcgggactttggcaatcggcgctggcctgtaaataacgttcacgctgttcagcggtcagtttatccacgccgctgccatcctgtacccagacattaacgccggttgctttaacgtgttccagcagttggcgatagccatcgggcgacatgtttccggcgaaaaaactactgatataaaccggttttgctgaaacatcgctaatcagccgctgcgcgttgtttaaccatgttagcaaaggctgacgggcggcttcgctgcgccagttcaggtcgtcaatttccgcgctgatgtaccagccatccggcgttatgccaggcgcggcgctccataatctggcttgctggagatcggcagccagcaggcgattaagatagctttccagcgctgcggacgactgtttctggtgcataaaaaattccggatcggcgttcagcccgacaataagcttcagaccagcctgttgcgcagctgcggcccgcttaaacaataacgtgcgctgttctggctgggtaaatgcatcgccgtaacgggtccattgcaaaacaagggtatcgaagccttgcaaacgtaactgactcatcagcccctgccactgggtatcggtaacctgactatctcggttttgtggttgccagataatacctttcatcgcaaaggaaaaagggctgaccaaaagcagtgtcagcaatacgaaaatgaacttacgcatttaccagtgcactccaatggtgagaaacgcgttgttgcgctctccgttacgttgattaatcgccttaaaggtatgttgatactcgacgccgagactgactttgtgcggccaggcgtcgtagtgcgtctcgccggtccagatattccagcggaccccgactccgccaagctgcgcgccctgagtgcctttatcacgatagccgttgtcctgaacgtgagcgtaaggctcaatagtctgtccgttagctaccttctgatgccagctgacgcgataatctgccgtccacgcctgaatatcctggcggatatattgcgccgcatcgaggtacaggttttgggcaaaccagcctgaaccgttcgggtgccattcgtcgctgtatttgccgccattaaagaatgaggcgctggcgcgcagcatggtatcggatgcgccattttggccgttcagcggcaactgctgttcgacggcgatgaaaaagatctgatcgcgcagcggcttccagcgcagaccggtgccggacatcggatttttcaccggcatcatcaccccgttttctccggtatcggcaaagacgcggctataaactgagagcaggtcgccttccagcagcatattgcgtccgatgcggtactcggcttccagttgtccgtagctacgatagcttttccctggcgctgcgccgccgacattattgttagcggtactcattgcgccggaacgcaagccgatggaagaatcgaaactgaacgtccagcggcgaccgacctcctcatgcaaacggcggaaattgaagcgttgttgattttgttctggggtcagtggggttatcagcgcctgattatcaatgtcatcaatcaccagccgggcgtagtgctgcgtcgcaggcatgtcatccagacgctggttcacgtaggccagttgtcggatcagtgccggatcgtccggaagccctttatgcgccggttcgagcatttcccgcgactgtgcgatatcaccgctatcccacaaggcgtaaccaagcgctgcctgggtgttgctattattcggttccagttccagcgcggcgcgcaaatcactcaccgcggccgggacattatgacgttggcgataaattgtcgcccgcgcaacgtaagcgttggcagaaggcgcaatattgattgagcgcgtgagatcgttcagtgcgagttccggctgaccaggaatgtaacgttgcgcatgcagccaccagtagagggcattgcttcccagtccacgtttttctgcctgttgtagccagcgatcgcgagccgcaccatttcctgccgcctgggcggtattggcagcagcaagcagatcctcattgctcatgtcgtgaagactgattttctgccaggccgccagtgcggtggcgtagtcctcaacctgatacgcctgataggctaccgcacgatgttgccaggcgctcggttgtcgttgttcggcctgaagccatgcatacaacgccacaccgggtagcgtgtcccgataacactttgccagacggttccaggcggcggcatcgtaggaaggcgacatatcgcccagcaagcgaactattgccgggcaattatctgcaatacccggcaactgactttgccactgacgttgctccgccagcggtaagggtttcgataaaatcgccaccttcgccggcgttgccaggtaaggatgactttccagcagagacgccagtcgcgccattaaagtctggctgacacgcgcatcgccctggaaaggatagcgttgcagcaataaatcggcagcttcgcgtgactgctcgttctgcatcagttgccaggttagttgatccaggcgggtaagatttgccggttcttgctgatacagcaatcgtgccagacgcagagcttcagccttgttacgggtcgccacgctgacagcataacgctcctcaagcatttcattggcggggagggtggcgagcagtttttgcgctgcgtcgtactgaccttcttttaacagcaccggtagcgtcgcgccaacaacatactggcggttgtcggcaaactgtaccgtataattcgccaacgcctgaacggggttagcgctgtatttagataacagatagagccaacttttctcttgtgcgtccgtggtaaatagtggcttattttcaatgagataatgctggaggcgtgctttttcgccacgataagccagcgcggtcgcgtaagtaatatatgactgaggatcggtgaagatcccctgtgattgcagtgccaggatccgatcgtccagctgcccggcaagaagcacgtcaaaccactgacggcgttctgccgcgcttaatgtgttctgctggcgtgcttcattgtatagcgtatctgcctgggaccattgtttcaggtagattgcccgttgcagcagatcggttcgcagcgtttttccttccggcgatgcagcaaacgtcgcatcgttcagttgcgctctggcgacaggtaactgtgccagccgcagggcattctgcccgacttcactgcgacaacgcagggtcggcgcagcatcgcacgctttttgctgggcaagcagttcttcaactgtcgtaacgcttttcacttcaaccggaatagccgccagactgcgctcaagtcgggcatctcctgggtgacgtttcagttgatcctcaagcaacagccgcgcccggtcatcatgaccaaaatggcgataggcttccgcaaggtataaagtcagcggaatattatccggcacctgctggtgtatatattcaaattcgcggatggcggttgcttcgtcgttatttttctgtgccttcagcgctttatcgagacggggataaataacaaaatggcgataatcgctcagccccagctcttctgcgctggtgccgatattgtctgcgagtgcgctggtactcaataaagacgtcagcagtaaaccagaccatccgatgacgcgattaaggttattctccttcattttcggactccagttgcgcaacctgttctgtgtttaaacctgctttgagtaatagtgattgcatcgaaacttgtaattcgcgttgaattgtcaggacgcgatccaacgtttcctggctgataacgccttcggtgaccaaaaacttgccgagcggcagagaactgcgttcatggcgcaataacaacacgttaattgctgaacgattaatatgaccgagcgtggtcagtatttcggcgaacaggaactgatgcggcacatattgccgccagatttcaccggcctgctgttccgtgagccactgatgctgaaccgcattgtacaacattgcccgcggatcgtgaccgcgtcggcgtgcataccagtgacgtaaccctgtgacaatttgtccccgcagaacaatgacgtaacgcactttgcgtccgactttacgcgtcagggccgccagcgaaaccgggtcaataccatcttcactgccgacaattaactcgtcattttccagacgcagcggcagtaccgcataatgcagcgccacggaggccggcatttcggcaatcagcgaggaagggatctgccaggcatcgatggattcccacgccacgccgttttgctctgccagcgcctgtgccagctgctcggcgctaatcagcccctgcatcagcattgaaccgcccaggcgtagaccttcgacgcgattacgcagtgctgtatcgagttgttcttcagtgatgacctgattttccagcagaatttgacctaacgggcgcaacgagcgggtatcgccagtcacgctggggaagtcatgcgttgttttatcccacgccacgcgacgtggatcgccgtgttgaagtacctgttttagcgcgcgccagttggccatgaagttaatcaggttgccccagaaaagacgcaggacggaaagcagcccctgcgtcaggccgtagtagccagtaacgaaaatcacccgctgcacgatgcggttaaccatcaaaccaaagtttagccacagcagggtcattaaccatgcgctgccgctgaaaatagaaaggaaatgccaggcatcgggccacaaactttcatacgccagcaacagcaaaagctggatcatcaccagcatcgcgaggaagctgacaaagttactgattgcccctttgcggtcgcgccagagaaagtagttcagcgtcaggctggaggtccatttatgggttttaaagccttggaaaacaatgccgatgatccagcgggatttttgtcgaaccgcagtcgaaaaggtatcggggaaatattcgcgcacgcagatcatgtttgatgtccgcgcgtgctgtaaaaatttacgctgctcgcgttctttggcttcgtccaccaccggaaaacggacaaaaatttccgtcatacctttttctttcaggcggaagccaatgtcgtaatcttcagtaagactctgcacgtcgaaagcaataccgtcaccgtcagctaacagtgcggtcacggcgcggcggctgaaacaggtgccgacgcctgcgctgggcacttgtccggcgagggcttcacgcaccggaacatctttgccatgcagctctgaaaactcatcaatgtaagtcatgctggtgaagtgcgtccattcgcgttcgaacggatacaccgggatctgaatcagatctttacgctcgaccagatagttgaacagacgcaattccatcggtgaaatcacatcttcggcgtcatgcagaataaaaccagcaaaagcgaaattggcgctacgctcaaattgggtgatggcgtccagcacgttgttcagacagtcggctttgctggtggggccaggacgcgcgcagactaccttatgcacattcgggaagcgagcgcacacttcgtcaacatcacgctgagtatcggggtcgttggggtaggtgccaacaaagatatgatagttttcgtagtcgagcgtggtcgccgccagctcggccatattgccgatgacgcccgtttcattccacgccggaaccataatcgctaacggtttttcatctggtttatacagttcgcggtaactcattcgcgggtagcggcgataaacactcaacttgcgtttaatgcggcgtacccagtagacgacatcaataaaaaaatcgtccagcccgctgatgaacatgatgaccgctaacgttatcgcgattacttttaagccgtagagccaggtagcaaaaacatcaagaagccagtccacacaaaaaccttacattaacgctggttatgtttagggtggcgtatattaaggttttttatgaattgtgacagctttttaccattaataggtatgactattgcggcacgttatttttacactggttataaaagttgccgtttgctgaaggattaagcgggtaatgtgataacaaaccttgtcccccgcgcatccgacgttaccgcaaccgtgcctttatgcgcgacaacaatcgatttcactatcgccaggccaataccgctaccttcaccttttcgctggcgggaggggtcaacgcgatagaaacggtcaaacaatcgcggtaagtgctcgggcgcaatgggcgtaccggggttttcgacgataacttgcaccaggtgatcgaccgtctgacagcgcactacaattgtctctccggttggcgtataacgcagggcgttcgaaagcaggttgcttagcgcccgacgcagcatcagcggatcgcccgcgacctgacacttgtcgccaacaaaccgcaactccacgccgcgatcttccgctaacgcctcgaaaaaatcgaacactttgccgacttcatccgccaggttgagcattttcttttcggggattagctggttgttatcggcctgagcgagaaacagcatatcgctgaccattttcgccattcgcgtcagctcttcgagattagagtagagcacatcttccagctccttctggctgcgcgactggctgagggcgatttcggtttgcgttatgagattcgtaattggtgtgcgaatttcgtgagcgatatccgctgagaaattggactggcgggtaaagacatcctcaatacgctcgatcatatggttgaacgacagtaccagctgttccagctcaatgggcacggtctgcgggtcgaggcgaacgtcgagatctttcgaggtaatattctggatttgacggctgacgctgcggatcggcgcgtgacctttatgtaccgccaacagtacgataaagacgatcaggatgctgattaccgatgcggtcataataagtttattcatcaaatcatttatgtaatgaagatgaaaatcgatcgaaagcgcgatgtagagcgtataaatcggtttgccgtccaccaacgggccaaccggcaagttaatcatccgccagttgctgtgttccatatgcccgtgaccgtggcctggcatcatcatcgtcgggccggaaaggagatacacctcgccaccctgagcgtctttatcgggtatggcgtcacgcgtaaactcgcggatatccggcgcaccgggggagtgatacaccgttttaccctgactatctgccagggaaatcaacacattggaataaccactgacgatatcttccagcgtcattaagcgtcgggcttgcgtttcgtcagggtgatttagtacccgttcaagggtggcgctaatctcttttaaatcattaatatcctgctcggcaaaatgaacttttactgagtggatcatgatccatgcaaaggcgaaaaacgccgcgatggtggccaggctgataaaaaaggtcaggcgggttgccagcgaaaacgggcgctgaaatggcttactgaccatccggcacctcaagcatgtaacccacgccgcgcacggtctgaattagcttcggctcaaagtcgttgtcgattttgccgcgcagccgcttcaccgccacatcaatagcattggtatcgctgtcaaaattcatgtcccatacctgcgaggcgataagcgagcggggcagcacttcgccctgatggcgaaggaagaactccagcagagtaaactctttactggtcaaagtgatgcgcgtgccgctgcgggtgactttgcggctgacgagatcgaccatcaaatcggcaacctgaaactgactttcgataatcaccgccgccccgcgccgcagtaatgtgcgcacccgcgccagcagttcagcaaaagcgaatggcttcaccaggtagtcatctgcccccaactccagccccttgacgcgatgttcaatggtgccaagcgcggtaagcaacagaatcggcatccctttattggcggagcgtaacatgcgcacgatatcccagccgttcacgtccggcagcataatatcgaggattatcagatcataatcaccggtcatcgccagatggtagccattcagcccgttgtcggccaaatcgaccacaaaaccggcttcggttaaccctttggtcaagtattctccggttttcttttcatcttcgacaatcaacagtttcatatttcctccgcatgttgcccgggcaattctagagtagcgggatcagatggcaatcgcttattggcaaaatgacaattttgtcatttttctgtcaccggaaaatcagagcctggcgagtaaagttggcggcataaaatcaccagaaattatgagcctatgtctccttgtaaacttctgccattttgtgtggcccttgcgctaaccggttgttcactggcaccggattatcagcgtccggcaatgcccgtgccgcagcagttctcactcagccagaacggcctggttaacgcagcagataactatcagaacgcgggctggcgcaccttttttgttgataatcaggtgaagacgctgattagcgaggcgctggtgaataatcgggatttgcgcatggcgacgctgaaagtgcaggaggcacgggcgcaatatcgtctgaccgatgccgaccgctacccacagctcaatggcgagggcagcggcagctggagcggtaatcttaaagggaataccgccacgacacgggagttttcgaccggccttaacgccagctttgacctcgattttttcggtcgcttaaagaacatgagcgaagccgagcgacaaaattatttagccactgaggaagctcagcgcgcggtgcatattctgctggtttctaatgtcgcgcaaagctatttcaatcagcaactggcgtatgcgcaattgcaaatagccgaagaaacgctgcgtaattatcagcagtcatatgcgtttgtcgaaaaacaactgttgacaggtagcagtaatgttctggcgctggaacaggctcgcggggtgatagaaagtacccgcagcgacatcgctaaacgtcagggggaactggcgcaggcgaataatgcattgcaactgttgctgggaagctacggcaagctgccgcaagcgcagacagtaaacagcgacagcctgcaaagcgttaaattaccggcgggattgtcgtcgcaaatcttattgcagcgcccggatattatggaagctgaacacgcgttaatggcggctaatgccaatattggcgctgcacgcgcggcattttttccgtctataagcctgaccagcggaatatcgaccgccagtagcgatctatcgtcattatttaacgccagcagcgggatgtggaattttatacccaaaattgagatccccatttttaatgccggacgcaaccaggccaatctggatatcgccgaaattcgccagcagcagtcggtggtgaattatgaacagaaaatccagaacgcctttaaagaagtggcagatgcgctggcattacgtcaaagcctgaacgatcaaattagcgcccagcagcgttatctggcatcgctgcaaattactttgcaacgggcgcgggcattatatcagcacggcgcagtaagttatctggaagtgctggatgccgagcgttctttatttgcaacccgacaaactttacttgatctgaattatgcccgtcaggttaacgaaatttctttgtataccgcacttggtggcggttgacagcaatatactcgtcatacttcaagttgcatgtgctgcgtctgcgttcgctcaccccagtcacttacttatgtaagctcctggggattcactcgcttgtcgccttcctgcaactcgaattatttagagtatgacttttaactccaggagagaataaatgaaaaaagcactgcaagtcgcaatgttcagtctgtttaccgttattggctttaatgcccaggctaacgaacatcatcatgaaaccatgagcgaagcacaaccacaggttattagcgccactggcgtggtaaagggtatcgatctggaaagcaaaaaaatcaccatccatcacgatccgattgctgccgtgaactggccggagatgaccatgcgctttaccatcaccccgcagacgaaaatgagtgaaattaaaaccggcgacaaagtggcgtttaattttgtccagcagggcaacctttctttattacaggatattaaagtcagccagtaacccaggtttaatgagatgaaaaaaatcgcgcttattatcggcagcatgatcgcgggcggtattatttctgcggcaggttttacctgggttgcaaaggcggaaccgcctgcagaaaaaacgtcgaccgcagaacgtaaaatcttattctggtacgacccaatgtatcccaatacgcggttcgataaaccaggtaaatcgccgtttatggatatggatctggtgccgaaatatgccgatgaagagagttctgcgtctggtgtgcgcattgacccgactcagacgcagaatctgggggtgaaaacggctaccgtcacgcgcggaccgctgacttttgcccagagtttcccggcgaatgtcagttacaacgagtatcagtatgccattgtgcaggctcgcgctgccgggtttatcgacaaggtgtatccgcttaccgtgggcgataaagtacaaaagggcacaccgcttctcgacctgaccattcctgactgggtggaagcgcagagtgagtatttactgctgcgcgaaaccggcggtacggcgacccagactgaaggcattcttgagcggctgcgactggcgggaatgccggaggcggatattcgccgcctgatcgccacgcaaaaaatccagactcgctttacgctcaaagcgcccattgatggcgtgatcaccgcgtttgatctgcgcgcgggaatgaatatcgccaaagataacgtggtagcgaaaattcagggtatggacccggtgtgggtcactgctgcgatcccggagtctatcgcctggctggtgaaagatgcctcgcagtttaccctcaccgttccggcgcgaccggataaaacactcaccatccgcaaatggacgctgctacctggcgtggatgccgcgacccgcacgctgcagctgcgtctggaagtcgacaacgccgacgaggcgctaaaaccgggcatgaacgcctggttgcaactcaacaccgccagcgaaccgatgctgctcattccgtcacaagcgctgattgataccggcagcgaacagcgggtgattaccgttgatgccgacgggcgctttgtaccgaaacgcgttgctgttttccaggcatcgcaaggcgtcaccgcattacgctctggtctggcggaaggtgaaaaggtggtttccagcggcctgttcctgattgattccgaagccaatatttctggcgcactggagcggatgcgctctgaaagtgctacccatgcgcattgagggaataaccaatgattgaatggattattcgtcgctcggtggcgaaccgttttttggtgctgatgggcgcgttgtttctgagcatctggggcacctggaccatcattaatacgccagtggatgcgctgccggatctctccgatgtgcaggttattattaaaaccagctatcccggtcaggcaccacaaatcgttgaaaatcaggtgacttatccgctaaccaccaccatgttgtcggtgcctggcgcgaagactgtgcgcggtttctcacagtttggcgactcttatgtgtatgtcattttcgaagatggcaccgatccgtactgggcgcgttcgcgggtgctggagtacctcaaccaggtacagggtaagctgcctgcgggagtcagcgccgagctggggccagataattaataataaacgggtgttggctggatctatgaatatgcactggtggatcgcagcggtaagcacgatctggccgatttacgctcattacaggactggtttctcaaatatgagctgaaaaccatccctgacgttgcggaagtggcgtcggtgggcggtgtggtgaaagagtatcaggtggttatcgatccccagcgcctggcgcagtatggcatcagtctcgccgaagtaaaaagcgcgctggatgcttcaaaccaggaagcgggcggttcgtcgatcgaactggcggaagcggaatatatggtgcgcgccagcggctatctgcaaacgctcgacgactttaatcacatcgttttaaaagccagtgaaaatggcgtgcccgtttatctgcgcgatgttgcgaaggtccagattggcccggagatgcgccggggcattgccgaactaaacggcgaaggcgaagtggcgggcggggtggtgatcctgcgatccggcaaaaacgcccgagaagtgatcgccgccgtgaaggacaaactggaaacgctgaaaagtagtctgccggaaggcgtggagatagttacaacatacgatcgcagccagctcattgaccgcgccatcgacaacctcagcggcaagttgctggaagagtttattgtggtggcggtagtctgtgcgctgtttctctggcatgtgcgctcggcgctggtggcgattatttcgttgccgctggggttgtgtattgcttttattgtcatgcacttccagggactgaatgccaatattatgtcgttgggtggcattgcgattgccgtcggggcgatggtcgatgctgctatcgtcatgatcgagaatgcgcataaacggctggaagagtggcagcaccagcatcctgacgccacgctggataataaaacgcgctggcaggtgatcaccgatgcgtctgttgaagtggggccggcgctatttatcagtctgctgattatcacgttgtcgtttatcccgatcttcaccctggaagggcaggaagggcgtctgtttggcccgttggcgttcaccaaaacgtatgcgatggcgggtgcggcgctgctggcgatcgtagtgatcccgatcctgatgggctactggatccgtggcaaaattccgccggaaagcagtaacccgctcaatcgctttttgattcgtgtttatcatccgctgttgctgaaagtactgcactggccgaaaaccacgctgctggtggcggcgctttcggtgctgacggttctctggccgctcaataaagttggcggggaatttttaccgcagatcaatgaaggcgacttgttgtatatgccatcgacgctgccggggatttccgcagcagaggcggcgagtatgctgcaaaaaaccgacaagctaattatgagcgtacctgaagtggcgcgggtatttggcaaaaccgggaaagcggaaaccgccaccgattctgctccgctggagatggtagaaacgaccatccagcttaagccgcaggagcagtggcggccaggcatgacgatggacaaaatcattgaggaactggataacaccgtgcggctgccggggctggcgaatctgtgggtgccgccaattcgtaaccgtatcgatatgctctcaaccggcattaaaagccccatcggcattaaagtttccggcactgtgctggcggatatcgacgcgatggctgagcaaattgaagaagtagcgcgaacggtgccaggcgtagcttctgcgcttgccgagcggctggaaggtgggcgctatatcaacgttgagattaaccgtgaaaaagccgcacgttacggtatgacggtggcggatgtgcagttgtttgtgacttctgcggtgggcggggcgatggttggcgaaacggtggaagggattgcccgttatccaattaatctgcgttatccgcaaagctggcgcgatagtccgcaggcactgcgccagctgccgatcctgacgccgatgaagcagcaaatcaccctggcagacgtggccgacattaaagtctctaccggaccgtcgatgctgaaaaccgagaatgcgcgcccgacgagctggatttatatcgatgcccgcgatcgtgacatggtgtcggtggttcacgatttgcaaaaagcgatagctgaaaaagtgcagttaaaaccgggcaccagcgtggcattctccgggcagttcgagctactggagcgcgccaaccataagcttaaactcatggtgccgatgacgttgatgattatcttcgtgctgttgtatctggcgttccgtcgggtgggcgaagcgttgctgattatcagcagcgtaccgtttgcgctggtgggcggcatctggttgctgtggtggatgggctttcatctttccgtggcgacgggcactggctttatcgccctcgccggggtcgccgccgaatttggcgtggtgatgctgatgtatttacgtcacgccatagaggccgtgccgtcgttgaataatccacaaacattcagcgagcagaagctggatgaggcgttatatcacggcgcggtcctgcgcgtgcgcccgaaagcgatgacggtggcggtgattatcgccggtctgctgccgattctgtggggaacgggggctggttcagaggtgatgagccggattgccgcgccgatgattggcggcatgatcaccgcacctttgctgtcgctgtttattatcccggcggcgtataagctgatgtggctgcaccgacatcgggtacggaaataaaagcaggataccccgtttaaccgtgtggattgtgtcttgcgacgatgggcactaaatgttaaaaggtgcccctcaacaaaaaagacacacaggggaaaggcgtgaaaaacgcgtcaaccgtatcggaagatactgcgtcgaatcaagagccgacgcttcatcgcggattacataaccgtcatattcaactgattgcgttgggtggcgcaattggtactggtctgtttcttggcattggcccggcgattcagatggcgggtccggctgtattgctgggctacggcgtcgccgggatcatcgctttcctgattatgcgccagcttggcgaaatggtggttgaggagccggtatccggttcatttgcccactttgcctataaatactggggaccgtttgcgggcttcctctctggctggaactactgggtaatgttcgtgctggtgggaatggcagagctgaccgctgcgggcatctatatgcagtactggttcccggatgttccaacgtggatttgggctgccgccttctttattatcatcaacgccgttaacctggtgaacgtgcgcttatatggcgaaaccgagttctggtttgcgttgattaaagtgctggcaatcatcggtatgatcggctttggcctgtggctgctgttttctggtcacggcggcgagaaagccagtatcgacaacctctggcgctacggtggtttcttcgccaccggctggaatgggctgattttgtcgctggcggtaattatgttctccttcggcggtctggagctgattgggattactgccgctgaagcgcgcgatccggaaaaaagcattccaaaagcggtaaatcaggtggtgtatcgcatcctgctgttttacatcggttcactggtggttttactggcgctctatccgtgggtggaagtgaaatccaacagtagcccgtttgtgatgattttccataatctcgacagcaacgtggtagcttctgcgctgaacttcgtcattctggtagcatcgctgtcagtgtataacagcggggtttactctaacagccgcatgctgtttggcctttctgtgcagggtaatgcgccgaagtttttgactcgcgtcagccgtcgcggtgtgccgattaactcgctgatgctttccggagcgatcacttcgctggtggtgttaatcaactatctgctgccgcaaaaagcgtttggtctgctgatggcgctggtggtagcaacgctgctgttgaactggattatgatctgtctggcgcatctgcgttttcgtgcagcgatgcgacgtcaggggcgtgaaacacagtttaaggcgctgctctatccgttcggcaactatctctgcattgccttcctcggcatgattttgctgctgatgtgcacgatggatgatatgcgcttgtcagcgatcctgctgccggtgtggattgtattcctgtttatggcatttaaaacgctgcgtcggaaataaggcattcacgctacatccgacaaaacgatgtcaaccatccgaaaccgctctcatccattcgatgagagcggtttttttaattactgcttaaatgcacccgccagagagcgaatatcattgccggttggcgactgatgaagtcgcagaccaaactcttcgacaatcgcaaatatgtgatcgaatatatcagcctgaatgctttcatattccagccacaccacggtgttagtaaacgcgtagatctcgagcggtaaaccgttatcacctggagccagttggcgtaccattaaggtcatatctttacgaatccgcggatggttacgcagatattcgttcagataggcacgaaaggttccaatattggtcattcggcgcagatttaataccgactccgtagaaccttgctggcgattccactcattaatttcctgatggcggctggttaaataaggctttaacaaatgcgctttattcagacgttgcatttcgtcttcatcaagaaaacgaatactggtgacatcaatactgatactgcgcttaatacgtcgcccgccagatgctgacatcccgctccagtttttaaaggagtcagaaaccagagaccaggtgggaatagtggtaatggtattgtcccagttacgcactttgacggtggttaacccaatatcgatcaccgcgccatccgcgccgtatttcggcatctccagccagtcgcccagtttcagcatatcgttcgcggaaagctgaatacctgccaccagaccaagaatcggatctttaaataccaacatcagcacggcagccattgcaccaagaccgctgatcagaatcgctggcgactgaccaatcagcagcgagatcatcaaaatgccgaccagaatcgcgccgatcagtttaatcccctgaaatatccctttcagcggtaactgagatgctgccgggaatttctgcgccagattcaaaataacatccagcaacgagaagactgaaagcagcgcatacatcatgatccacaactgcgcgcaggtagtcagaatatctgccgcttcggtgcctttttgcagccagaataccgcctgaatattgacgataatcccctgcagggtaaaagctaaacggtggaagagtttattctgggtaatgatttgcaaccaaagccgtgaactggcgatggcacgtttttcgaaggtccgcagtaccacccaatgcaaaataatatgcaccacgacggcggtcagaaaaataataccgaaaatcatcaccatcgaggtggtgtgatcgatctcaatacccgctaaatcttcaacctgggatattaaatcctgcataacgtctcctttatacaacagcagcctatgatgacggctgaaacagggttatgcaaatcaggagaatctgagaggaaatagccgggcagatgcccggcaagagagaattacacttcggttaaggtgatgttttgcggcagacgagatttcggcagcgtagcgttaaaatcttcaacgctgtgatgacctaccggaacaaccaccagactggtgtagcctttctctttcagaccaaattctgcatcgaggatggcggcgtcaaaaccttcgatgggtaccgcgtccagacccagagccgccacgccgagcaggaagttaccgacgttgagataaacctgttttgccatccactctgcatcatcatgcagatctttacggtgcatatcagcgaagaacttgcgacctttatcgttcgcggctttcgcttccggcgtggcaaagcggccatcggcatcttcctggtcaacaaccagcttcagccagacatcgtccatcgcggtttttgcacagaacaccacgacgtgcgaggcatcaagcattttacgctcgttgaacacgtaattaccggcagcggatttggcaacacgcgctttaccttcttccgtgctggcaacaataaaatgccacggctgggagttggtgctggatgggctgtattgcagtagcgttttgatctgctcggcctgttccggggtaagttttttgctggcatcaaatgccttagtggaatgacgctttaaggcgacagaaatgatatccataaagactccatgtgaaagtaattttgcgtgccagcagattacaaggttcaacgagaaatggtaagcgagaaaaatgcgctatagatttccgctttagcctggacgcactcttttttgatcgcgtttagccagaccatcaaccaccagattccacgaatcgttgatcagatcgcgaagtaacgcttcggagatttcttcgccgggatacactgaaatccagtgctttttattcatgtgataccctggcttaatgcttgggtatatttgctgatttaacagggatttttgtggatcggacttcagattgataaaggggacgccgcgtagctccgacgacagcataaaaatcttgccgccaattttaaaaacatcgaactccgggccaaaaggccagcaaagctcgacaaagggtaactcaagggccaggcgtttcgccgtttcgtgcagtgattgcttatccataaacgttcctttaggcgaaggagaataagcaaagtatgccgcgaagtacggcgataatcgacgtttaatccgccagcgagaaccagcgtcgccagataaagcgcagaacaaaatactcaatagcgcccagcactaaaaaccacagacaaaacaataaagtgtaaagctgactaagatccatcagatggaacatggtcaccagtttttgtgccagcgccagccccagtgcgggggcgggcagcagcaggcaagagaggaaagccatcagcaaaatgcctgctgcggtggtcaaggtttctaaagggtgtttcataacattgttaaatgtaagttaaaacaccattgtcagggatattcttctgtaaggcaattcccggcttagtcaccggcccagatctcacaatgctttttcaccagcccaatcagcgagccgccatcggcgacgaaatcgcgcattagctgcgcttcattcagaccgctgacgacctggcgatgcagggcctcaatcgcgctcgatgcaccaattttatgtgcggaaggggcgattttttccagcaatcgcaaggtatcttccgttagcggtcgacgatctccagtgtgcggatcggtgatgacgccttcaagcccatagcgacaggcctggaaacggttgaatttatacagcaggtaatctttttcctgatgtttaaacgggcgttccgtcagtaaccagtgggcggtagcctgaattaatcccgccatatttactgcgtggctaagggttaacggggtatccatcacccgaacctccaccgtgccaaaatgaggactggggcgaatatcccagtgcagatctttaatgctgtcgatcatcgtggtgtaactcagacagcgaaacagggcttcaaattgttgccagttactgacccacggcatcgggccattatcaggaaaggcggaaaaaatattcggtcgtgaggaggcaaaacgcgtatccgttccctgcatatatggcgacgcggcggaaagggcgataaagtgcggcacaaatcgtgacaagccgtgcagcaaataaatggcgtcatcgccactggcgcagccaacatggacatgctgaccaaaaacggtcgcctgctgaatgagataaccaaagttttccagcgtgcgttgatagcgttcgttatcgcatacctcctgacgctgccatttctgaaacgggtgcgtgccaccgccgcaaatttccagatgatggtctgtggctgcctgcaatacgactttctgcatcgctgaaaactgcccggcagcctggttgatatcacggcaaacatccgtcgccagctccagcatactttcggtgatatcgtgctttacctctccggccgtgatcttatttttaaccgcgtcaatcagcattgaagagtcctggcttaagtcatagcccggcggattaaccacctgcatttccagttcaataccgagggtaaaaggttcagaaacatgaaaatcgggtaatggcataggtttctcttatgttggcgttttctattcagtatagaagtcggagcggctgggcgagatgcggaagttctggaatgtttcttttttttggtgatggtgaactgatggtgcctgaagcaatttggctacttttgcaatgtgacaagttatggcagtgctgactggtggcgaagaattttgacgattgagtcatgcagaaaaaaacgggttcagcttcagttgattaaatgaggagtgagaagtccgaaacaggactcactgtataaataaacagctattttgttgaggaagggtaagataacggcgggtgcctgaagctttccggtttcaggtttactctgaggtctggaaagatgaagccccaggagatatttctatcaaccctggggctgccactccaaacccgaacaatttggatggtagtcccttcttcgcatggaggcaatataaacatgctgacgaaatatgcccttgcggcagtcatagtgctgtgtttaacggtgctgggatttacgcttctggtcggagactcgctgtgtgagtttacggtgaaggaacgtaatattgagtttaaggctgttctcgcttacgaaccgaagaagtagccgttgtgcggggagtaatcccataagcgctaacttaagggttgtggtattacgcctgatatgatttaacgtgccgatgaattactctcacgataactggtcagcaattctggcccatattggtaagcccgaagaactggatacttcggcacgtaatgccggggctctaacccgccgccgcgaaattcgtgatgctgcaactctgctacgtctggggctggcttacggccccggggggatgtcattacgtgaagtcactgcatgggctcagctccatgacgttgcaacattatctgacgtggctctcctgaagcggctgcggaatgccgccgactggtttggcatacttgccgcacaaacacttgctgtacgcgccgcagttacgggttgtacaagcggaaagagattgcgtcttgtcgatggaacagcaatcagtgcgcccgggggcggcagcgctgaatggcgactacatatgggatatgatcctcatacctgtcagttcactgattttgagctaaccgacagcagagacgctgaacggctggaccgatttgcgcaaacggcagacgagatacgcattgctgaccggggattcggttcgcgtcccgaatgtatccgctcacttgcttttggagaagctgattatatcgtccgggttcactggcgaggattgcgctggttaactgcagaaggaatgcgctttgacatgatgggttttctgcgcgggctggattgcggtaagaacggtgaaaccactgtaatgataggcaattcaggtaataaaaaagccggagctccctttccggcacgtctcattgccgtatcacttcctcccgaaaaagcattaatcagtaaaacccgactgctcagcgagaatcgtcgaaaaggacgagtagttcaggcggaaacgctggaagcagcgggccatgtgctattgctaacatcattaccggaagatgaatattcagcagagcaagtggctgattgttaccgtctgcgatggcaaattgaactggcttttaagcggctcaaaagtttgctgcacctggatgctttgcgtgcaaaggaacctgaactcgcgaaagcgtggatatttgctaatctactcgccgcatttttaattgacgacataatccagccatcgctggatttcccccccagaagtgccggatccgaaaagaagaactaactcgttgtggagaataacaaaaatggtcatctggagcttacaggtggccattcgtgggacagtatccctgacagcctacaaaacgcaattgaagaacgcgaggcatcgtcttaacgaggcaccgaggcgtcgcattcttcagatggttcaacccttaagttagcgcttatgggagtaatccccgcatatccggttgtcaggtcaggatggtaaggcacctgctttacactttcgcccgtggtcagtgatggctgcgggcgaatcgtaccagatgttgtcaattaatcgtgttggcacagcgttatgactatcttttcttttatctgccagtgcacagcaaacatctcattctcacgatgaatgatgacctgctgtttattccagctaattatctgatagtccagaaaacctgcatcagtttggatctcacttgccttaaatgcgctctctttggcggaaaatgccagtgtcagcgccagagaaaaggctaaaccgcagtctgcgagtcgctcgtgttccgctggtgtaataatgttgtctgtcaattctcttgcggtttgtacagaaaaaatttcttctatatcaatgccaatcggttgacgagataccacggctaatgccgtagtcccacagtggctaatactgccgtatacctccgcaggccagacaggttggcgtagctcgccgattgcgggcacacatttatagccatattcccgcaaagcataaacagcagcgatccgtccggctaaatgctctgttttacgtttacgtccagcgtgttgcagttgtgcgtagtgcggcagccagagtaaatcctgctcacaaaaattcgccggatcgaactcaacaaaatgcagcgtatgtccggcaaaggggagggaggtatgcgtagttttcatatcgaccatattcgagactgatgacaaacgcaaaactgcctgatgcgctacgcttatcaggcctacatggtcctgcaatatattgaattggcaagatttttgtaggccggataaggcgttcacgccgcatccggcatgaacgacgcgcactttgtcaacaatctgacgttagcatcagaagtgggtgtttacgctcatataccacgtacgtcccggctcgttataggtatacgccccggcaccggcgatatagttggcccctgccaaatcgcccgtggtctgggcattacccgcacgccacaaacgtttgtcgaacagattgtccacgccgccggtcagactgacattcttcgtcacatcccaggtcgcgctcaggccaacaatgctgtaaggactaatttctttggtttccggtccaaccgctggctgacctttatagttgtacttcttcggctgctgcttgccgtaccaggtgaaggtcgtttgcatcgacaaatcttcccgtgcctgccagctcagcgttgagttcaacgtatactccgggatgatcgacaaacggtcgcccgtggttttgttttcactcttcagcatataagtgatgttattggtccacatcaccgtttcgctaaccggtacgtttaacgatccttccagaccttcaaccaccgctttcggcacgttatcccactgatagagatcggtgccgactgcgttttgccctacagccacatagcccgcttcaatcttattgcgataatcgttacggaaccaggtgacgcccgccagccacccgtcgcgtttgaactccagaccaatctctttgttgatgctggtttctgctttcaggtcatcgttaccttgcagatagcagccgcccgcgctggcatagcaaccctgacctttactgtagagaatgtagttcgggttagtctggtacaggctcggcgctttataagcacgggcgatgcccattttcagcgtgaagtcatcgcctaaaccttgcgatatgttcagcgccgggctccagttattgccgacaatactgtgatgatcgaaacgcagccccggcgttacgatggtgctgtcagtcagctccatgttgttttcggcaaacagcgagaaaatttctgcttttgaatacgggctacggtcggtggtactcacgccatcaatagcgccaccggtattcgttccggtcagtgcctgggtgttggaacttaagtccttcatccgttgctgattccactccgtacccagcgtcagcgtctggttaacgaggaaatcaatcggcaggttaacttcgctgtgcagcatcacgtcatcaagatcgatatcgacgaaatcctgtgtcgctttttcgttaaatttcccttcggtaccgcccgccagaccttccggaatacgcgagttacgggtgtgttcgtactgcacccagttgctggtggtcacgccgttatcccagccaccgttccaggtcagcgcgtagttctggcgatacagacggttggtttcatcgccatatttcgagcgggtataggaatcggagttggtattctgggtgtcgcccgcatacaggttaccctggcggctgtaacctgcttccagttccagcgattgcaatggcgcgaaatcccagcgcaccacgccattaatatctttgttgattaccccttcgcgcccggctggtaacgtcgtggcatacgttccggcacgcgcggactgatggccctggttgatatcccacgcgtcagcctgggttttgtcgaggttgccatacaaacggaagctgaattcgtcgcccagcggaccggtcaggctaaagttagtgcgtttggtggcaccttcctctttatgttctggcgcattgaaatatgcgtcccaggagccgtgccactcgccgctgccttttttggtaatgatgttaaccacgccgcccgccgcgccgttgccataacgcgcagctgccggaccacgcagaacttcaatacgttcaatcatttcaggtggcacccaggaagtatcaccacgggtatcgcgctcgccacgccagccctgacgcaccgagttacggctgcttaccggcttgccgtcaatcaaaatcagcgtgttttccggacccataccgcgaatatcaatctgtcggttattcccacgctgaccactggtggagttaccggtcaggttaacgcctggcatggtacggatgatcttcgacacatcgcgggcaaccgggtttttgcggatttcatctgcggtgatggtcgaaacgccaggcgcctgtaagttctgctcggcggcggtaacgacaatagtatcgtcatgtgaaacaggagtatcggtcggctcttgtgcctgcgctaccccataaatccccagattgaccaacaaggccagggaatgaatcttcttgttcattgttttattcctgcatttttgccacgaattgcaactgtcgggcatggtcgtcatcaacacgacgcatcccgctaccgcgaaaacctttgatcctgaaagacacgcagtgcagttggttaattaatgtccgcgcttcccacggcgcgccattacgctattgcaaatgcaaatagttatcaataatattatcaatatatttctgcaatcaatgaaaaattgcacagtaaacatggggttatggtgtgacggcgttaaaagtaggaagtgagagctggtggcagtcgaaacatggcccggaatggcagcgtctgaatgacgaaatgtttgaggtcactttctggtggcgtgatccccaaggttctgaagaatactcgacgataaagcgcgtatgggtctacatcactggtgtgaccgatcaccatcagaacagccagccccagtcgatgcagcgaattgcaggcactaacgtctggcagtggacgacacaactcaatgccaactggcgcggcagctactgctttattcccaccgaacgcgatgacattttttctgtaccatcccccgatcgcctcgaattgcgcgaaggctggcgaaaactattaccccaggcgatagccgatccgctgaacctacaaagctggaaaggcgggcgagggcacgctgtttctgcactcgaaatgccgcaagcgcctctgcaaccgggatgggattgtccgcaagcgccagaaatacctgccaaagaaattatctggaaaagtgaacggttgaaaaagtcacggcgtgtatggatttttaccaccggcgatgcaacagcagaagaacgcccgctggcagttttgctcgatggcgaattttgggcgcaaagtatgcccgtctggccagtgctgacttcgctgacccatcgtcagcaacttcctcccgccgtgtatgtgttgatcgacgctatcgacaccacgcaccgcgcccacgaactgccgtgtaatgcggatttctggctcgcagtacagcaagagttattacccctggtgaaagctattgccccttttagcgatcgtgccgatcgcaccgtggttgccgggcagagttttggtgggctttccgcgctgtatgccggactgcactggcctgaacgctttggctgtgtattaagccagtcaggatcgtactggtggccgcatcggggcgggcagcaagagggcgtgttacttgaaaagctaaaagctggtgaagttagcgccgaaggtctgcgcattgtgctggaagcgggtattcgcgagccgatgatcatgcgggccaatcaggcgctgtatgcgcaattacaccccataaaagaatccattttctggcgtcaggttgacggcggacatgatgcgctttgttggcgcggtggcttgatgcaggggctaatcgacctctggcaaccacttttccatgacaggagttgaatatggcattcagtaatcccttcgatgatccgcagggagcgttttacatattgcgcaatgcgcaggggcaattcagtctgtggccgcaacaatgcgtcttaccggcaggctgggacattgtgtgtcagccgcagtcacaggcgtcctgccagcagtggctggaagcccactggcgtactctgacaccgacgaattttacccagttgcaggaggcacaatgagccagcatttacctttggtcgccgcacagcccggcatctggatggcagaaaaactgtcagaattaccctccgcctggagcgtggcgcattacgttgagttaaccggagaggttgattcgccattactggcccgcgcggtggttgccggactagcgcaagcagatacgctgcggatgcgttttacggaagataacggcgaagtctggcagtgggtcgatgatgcgctgacgttcgaactgccagaaattatcgacctacgaaccaacattgatccgcacggtactgcgcaggcattaatgcaggcggatttgcaacaagatctgcgcgtcgatagcggtaaaccactggtctttcatcagctgatacaggtggcggataaccgctggtactggtatcagcgttatcaccatttgctggtcgatggctttagtttcccggccattacccgccagatcgccaatatttactgcacatggctgcgtggcgaaccaacgcctgcttcgccatttacgcctttcgctgatgtagtggaagagtaccagcaataccgcgaaagcgaagcctggcagcgtgatgcggcattctgggcagaacagcgtcgtcaactgccgccgcccgcgtcactttctccggcacctttaccggggcgcagcgcctcggcagatattctgcgcctgaaactggaatttaccgacggggaattccgccagctggctacgcaactttcaggtgtgcagcgtaccgatttagcccttgcgctggcagccttgtggctggggcgattgtgcaatcgtatggactacgccgccggatttatctttatgcgtcgactgggctcggcggcgctgacggctaccggacccgtgctcaacgttttgccgttgggtattcacattgcggcgcaagaaacgctgccggaactggcaacccgactggcagcacaactgaaaaaaatgcgtcgtcatcaacgttacgatgccgaacaaattgtccgtgacagcgggcgagcggcaggtgatgaaccgctgtttggtccggtactcaatatcaaggtatttgattaccaactggatattcctgatgttcaggcgcaaacccataccctggcaaccggtccggttaatgaccttgaactggccctgttcccggatgtacacggtgatttgagtattgagatcctcgccaataaacagcgttacgatgagccaacgttaatccagcatgctgaacgcctgaaaatgctgattgcccagttcgccgcggatccggcgctgttgtgcggcgatgtcgatattatgctgccaggtgagtatgcgcagctggcgcagctcaacgccactcaggttgagattccagaaaccacgcttagcgcgctggtggcagaacaagcggcaaaaacaccggatgctccggcgctggcagatgcgcgttacctgttcagctatcgggaaatgcgcgagcaggtggtggcgctggcgaatctgctgcgtgagcgcggcgttaaaccaggggacagcgtggcggtggcactaccgcgctcggtctttttgaccctggcactccatgcgatagttgaagctggagcggcctggctaccgctggataccggctatccggacgatcgcctgaaaatgatgctggaagatgcgcgtccgtcgctgttaattaccaccgacgatcaactgccgcgctttagcgatgttcccaatttaacaagcctttgctataacgccccgcttacaccgcagggcagtgcgccgctgcaactttcacaaccgcatcacacggcttatatcatctttacctctggctccaccggcaggccgaaaggggtaatggtcgggcagacggctatcgtcaaccgcctgctttggatgcaaaatcattatccgcttacaggcgaagatgtcgttgcccaaaaaacgccgtgcagttttgatgtctcggtgtgggagtttttctggccgtttatcgcaggggcaaaactggtgatggctgaaccggaagcgcaccgcgacccgctcgctatgcagcaattctttgccgaatatggcgtaacgaccacgcactttgtgccgtcgatgctggcggcatttgttgcctcgctgacgccgcaaaccgctcgccagagttgcgcgacgttgaaacaggttttctgtagtggtgaggccttaccggctgatttatgccgcgaatggcaacagttaactggcgcgccgttgcataatctatatggcccgacggaagcggcggtagatgtcagctggtatccggcttttggcgaggaactggcacaggtgcgcggcagcagtgtgccgattggttatccggtatggaatacgggtctgcgtattcttgatgcgatgatgcatccggtgccgccgggtgtggcgggtgatctctatctcactggcattcaactggcgcagggctatctcggacgccccgatctgaccgccagccgctttattgccgatccttttgccccaggtgaacggatgtaccgtaccggagacgttgcccgctggctggataacggcgcggtggagtacctcgggcgcagtgatgatcagctaaaaattcgcgggcagcgtatcgaactgggcgaaatcgatcgcgtgatgcaggcgctgccggatgtcgaacaagccgttacccacgcctgtgtgattaaccaggcggctgccaccggtggtgatgcgcgtcaattggtgggctatctggtgtcgcaatcgggcctgccgttggataccagcgcattgcaggcgcagcttcgtgaaacattgccaccacatatggtaccggtggttctgctgcaacttccacagttaccacttagcgccaacggcaagctggatcgcaaagccttaccgttgcctgaactgaaggcacaagcgccagggcgtgcgccgaaagcgggcagtgaaacgattatcgccgcggcattctcgtcgttgctggggtgtgacgtgcaggatgccgatgctgatttcttcgcgcttggcggtcattcgctactggcaatgaaactggcagcgcagttaagtcggcaggttgcccgccaggtgacgccggggcaagtgatggtcgcgtcaactgtcgccaaactggcaacgattattgatgctgaagaagacagcacccggcgtatgggattcgaaaccattctgccgttgcgtgaaggtaatggcccgacgctgttttgtttccatcctgcgtccggttttgcctggcagttcagcgtgctctcgcgttatctcgatccacaatggtcgattatcggcattcagtcaccgcgccccaatggccccatgcagacggcggcaaacctggatgaagtctgcgaagcgcatctggcaacgttacttgaacaacaaccgcatggcccttattacctgctggggtattcccttggcggtacgctggcgcagggtattgcggcgcgactgcgtgcccgtggcgaacaggtggcatttcttggcttgctggatacctggccgccagaaacgcaaaactggcaggaaaaagaagctaatggtctggacccggaagtgctggcggagattaaccgcgaacgcgaggccttcctggcagcacagcagggaagtacttcaacggagttgtttaccaccattgaaggcaactacgctgatgctgtgcgcctgctgacgactgctcatagcgtaccgtttgacggtaaagcgacgctgtttgttgctgaacgcacacttcaggaaggtatgagtcccgaacgcgcctggtcgccgtggatagcggagctggatatctatcgtcaggattgtgcgcatgtggatattatctctccagggacgtttgaaaaaattgggccgattattcgcgcaacgctaaacaggtaaattaatattatttataaacccataattacagaaaataattatgggttttttatttgtttgatttataggtttgatgaatatttctcttaaatagagtgaatgttgcattcagtggaaggaatttacaaacttcagcttcggataattatcaccaactggtaaagtgagcgccgtggagatttccccctattggactcattttcaggttataccccatgtcatcactgaatattaaacagggaagtgacgctcattttcccgattatcctctggcgtcgcccagtaataatgaaattgatttacttaatctaatctcagttttatggcgggccaaaaaaacggtcatggcggtcgtttttgcgtttgcctgcgcaggcttgctgatctctttcatcctgccgcaaaaatggaccagcgcggcggttgtcacgcctccagaacctgttcagtggcaagagttggagaaatcattcactaagcttcgtgtgctggatctggatatcaaaattgatcgtacagaagcatttaacctgtttatcaagaagtttcagtcggttagcttgctggaagagtacctgcgttcatcaccttatgtgatggaccaattaaaagaggcgaaaatcgacgaactggatttgcatcgcgcaattgtcgcattgagcgaaaaaatgaaagcggttgatgacaatgccagtaagaaaaaagatgaaccgtcactgtatacctcctggacgctaagttttaccgcgccaaccagtgaagaggcgcagaccgttttgagcgggtatatcgattatatctctacgttggtggtgaaagagtcgctagaaaacgtccgtaataaactggagatcaaaacccagtttgaaaaagaaaaactggctcaggatcgcattaaaacgaaaaatcaacttgatgcaaacattcagcgcctcaattattcactcgacattgccaacgcggcaggaattaaaaagcccgtttacagtaatggtcaggccgttaaagatgaccccgatttttctatttctctcggtgcagacggtattgaacgcaaactggaaatagaaaaagcggtcactgacgttgcggaactgaacggtgaattacgtaatcggcagtatcttgtcgagcaattaacaaaagcacatgtcaacgatgtgaattttacgccgtttaaatatcagttaagcccgtcattgccagtgaaaaaagacggtccgggtaaggcgattattgtgatcctttccgcgttgatcggcgggatggtggcttgtggtggcgtgctgttgcgctatgcgatggcatccagaaaacaggatgccatgatggcagaccacttagtttaactatttgcggttgaaggtgccgttcgtccgagcggcaccacaagcggcgttccggcaactggatcgtcaatgatcatgcagcgcagaccataaatgcgctcaatcagttcagcagtgacaatctccttcggcgctccctgagcaacaattttcccttcccgcaatgcaatcaaatggctggcgtaacgacaggcctgattaagatcgtgcagcaccgccgccagggtatagcctttttcgcggttcagttcgcttaacaactccagcaaatcaatctgatgactgatatccagccaggtcgtgggttcgtcgagcagcataattgccgtttcctgggccagcaccatcgcgatccacgctcgctggcgttgtccgccagaaagggtatccacgctttgatctgccagatgagttattcccgtggcctgcattgctttcgttaccgcttcttcatcctctttgcgccagcgggtaaacagcggttgatgcggataacgtccacgcgccaccagctcctgcacggtgatatcgcccggcgtggtagcattttgcgccaacagaccaatccggcgtgcaacctctttactggcgtaatgttgaatgtgctcgccatccagccagacatgcccatgagcaggcgtcatcaggcggcttaaggtacgcagtaacgtggatttaccgcagccatttggcccgataattgccgtgaagtgaccatcaggtatttctacagtcagattttccgcaacggtatatttgccatatcccagggttaactgttcgccgcgcaaacgggctactgattcggtcattttttgcgagactcctgaattaacaagacgataaggtaaataccgccgaggctgacggtaacgacgccaaccggaagttgatacggcataaacagttgttgggcgcagagatcggccgccagcagtaacagcgccccgcatagcgccgcctgggttagcccccagcgagcggtgccgctaatgcgtcgggcaatgtgcggtgcgactaaagcaataaaggaaatcggcccggcaagcgctgttgccgcagcggtaagcaccactgcaaccagcatcattaacagacgcgaacgttcgacgctgacgcccagcgcacacgcggtatcatcgcccatttccagcaagcgcatccggcgtaccagtaaggcggcggcaatgagcatcaatataatgatgggtgcggaaggcgaggtttttgcccacgtcaggccgttgagcgatccggcattccacaaacctgctgttagcgccgtttctaaagacgctttcagcaacagccaggtattaaaggccaccagcatggcgcgaacgccgataccgataataatcaaccgaaaggtgtcgatgccgttgcgccaggcgagcagccagaccagcagcgaagtgacaatgccgcccaccattgctgacagcgcgatagccgtcaggtcctgaccaaacagcaccatcgccaccagcacgccgctccacgccccggtgttaaagcccattacgtcagggctgccgagcgggttacgcatcagcgactgaaaaatcgcgccactgacgcccagtgctgcgccaatcaacagcgccatcagcacgcgtggtaaacgccattcggtgaccaccatcgtcatactgcgcggcgcatcgcccatcagcgcggcgaatacctgcgaggtttccagcgtgacggcaccgctgcgtaatccccagatacctgcaaccacacaggcggaaaccagcagcaaacaggtgatgagtaatcggcgagagacgtaaatcatgcaccacctcgcgttttacgtcgcacgaggaagatcagcaccggtgcaccaataaacgcactgaccacagaaacgcgcagttcgccgggcacaatcacccgcccgatgatatcggcaaacagcagcagggcaggggtagcaagtagcgtgacgggcagcgaccagcgatgatcggcacccaccagccaacgcgccatatgcggcatcatcaggccaataaaggcaatcgggccaactattgccgtcgcactaccacaaagcacggtaatcgccagcagaccaatcaactgtgtgcgcgccacgcgactgcccagcgccgtcgcggtgtcgctgccgaggctcaaactgttcagcgcgcgactcagtaatagcgcagttgctccggcgatcagcaccgggatcagcaccacttttaaggtatgtagattgcgaatatccagcgaaccggcttgccagaaacgcaactgatcgtagacgtcaggattaagcagggcgatgccgctggtcagtccttccagcaccgccgccagcgccacgcccgccagggttaaacgcaccggacttaactgcccgccgccctgactgccggtaaaggcaacaatcaatgaggccaccagcgccccggcgaaggccatcgccagttgttcctgcgcggaagagtaaccaaacagcgccgcacccagcacaatggcaaagctggctccggcgttcacgccaagcaagccggggtcggcaagtgggtttcgggtgagggtttgcattaacgccccggcaaggccaagcgcgccgcctgccagtaaaccggcaagggtacgcggcagccgcgcgtcgagcacgatggtgcagtcggcgctctggcaggtgccggagaaggcctccagcactacggaagcggggagtgattttgccccaatgagcaggcttaatgccgtcgcgataatcagtaataacagcaatccgggcacggcaatggcgcgtgtcacggcaacagaaccagacatacgaacttccatgataatgaaattaattatcgttatcgatcttatttggatatgttagcatgtgcagcctaagaataggtatttaaaatatttgatggcaaggcattgtaatgaataaacaatcctggctgcttaacctcagcctgttgaaaacgcacccggcgtttcgcgcagtattcctcgctcgtttcatctcaattgtgtctctgggtttgctcggcgtcgcggtgccggtgcagatccagatgatgacacattccacctggcaggtggggctttcggtgacgctgaccggcggcgcgatgtttgttggcctgatggtcggcggtgtgctggcggatcgctatgagcgcaaaaaagtgattttgctggcgcgcggcacctgtggcattggcttcattggactgtgccttaatgcactgctgccggagccgtcattgctggcaatctatttacttggtttatgggatggttttttcgcatcgcttggcgttacggcgctattggcggcgacaccagcactggtagggcgtgaaaacttaatgcaggccggggcgatcaccatgttgaccgtgcgtctggggtcggtgatttcgcccatgattggcggtttattgctggcgaccggtggcgtagcctggaactacgggctggcggcggcgggcacgtttattaccttgctaccgttgttaagccttccggcgttgccaccgccaccgcagccgcgtgagcatccgttgaaatcattactggcaggatttcgttttctgcttgccagcccgctggtgggcgggattgcgctgctgggtggtttattgacgatggcgagcgcggtgcgggtactgtatccggcgctggctgacaactggcagatgtcagcggcacagattggttttctctacgcggcgatcccgctcggcgcggctattggtgcgttaaccagcgggaagctggcacatagtgcgcgaccagggttattgatgctgctctccacgctgggatcgttcctcgccattggtctgtttggcctgatgccgatgtggattttaggcgtggtttgtctggcgctgttcggctggttgagtgcggtcagctcgttgctgcaatacacaatgctgcaaacgcaaaccccggaagcgatgttagggcggattaacggtttgtggacggcgcagaacgtgacgggcgatgccataggcgcggcgctgctgggtggtttgggcgcgatgatgacaccggttgcttccgcaagcgcgagcggttttggtttgttgattatcggcgtgttgttattgctggtgctggtggagttgcgacattttcgccagacgccgccgcaggtgacagcgtccgacagttaatgcttaaaacagcgccttaagcctatccagcacttgcatggcgctgtagtaatccagacggaacgtctcggttcccagcgcataaacctgcttgttttgtactgcaggcaggtgcgcgagcagcggattagcataaatagcatcggcatctttctgatcaccggcgaacaggaatagtgactcgccatttaaccctgcagccagattttccccaccaagctgaatgatgtcatggcgtttaccctgactttggctggcatttaaccctgcgggtaacttcgccagcgtaaagccgagttgttccagcatctgcccttgtgctgattctggcgtccagagattggcactgtgtgcagcggcagtatagacaatggcagtgaccggctgcggcggtaatttgatttgctctttcgccgccgccagttgcttatcaaactgcgcaatccgctctgccgcttgtttctcatgcccggtaatttcgccaagttgcgttaacagcgactgccagcttttgtcgtcgtaattgatgattaatgtcggggcgatggtggaaagctgatcatacagtgccagcgccgaatccccgccggttgcgctaattaaaatcagatccggcatttgcgcggcaacggcttcggcgctcggttcgccgatatagagccgttgcagtttgcgttctttcgccaccttgctccactggcgtaaaaagccctggtcatccgcgacgcggttattcggcgtggtcgcgccgctggcgatcaccggagcatcaatcgccagcagtgagccggtcagggtgacgctggtggaaacaatacgctgcggctggctttccagtgtatgtgtgccacggctgtcagtaatctgacgcggccagtcagcggcctgaactgcggctattcctgaaagcaaaagtcctgttaatagaagggcgttgcggtagagcggggcgagtctcacaaatcagcttcctgttattaataaggttaagggcgtaatgacaaattcgacaaagcgcacaatccgtcccctcgcccctttggggagagggttagggtgaggggaacagccagcactggtgcgaacattaaccctcaccccagccctcaccctggaagggagagggggcagaacggcgcaggacatcacattgcgcttatgcgaatccatcaataatgcttctcattttcattgtaaccacaaccagatgcaaccccgagttgcagattgcgttacctcaagagttgacatagtgcgcgtttgcttttaggttagcgaccgaaaatataaatgataatcattattaaagcctttatcattttgtggaggatgatatggatacgtcactggctgaggaagtacagcagaccatggcaacacttgcgcccaatcgctttttctttatgtcgccgtaccgcagttttacgacgtcaggatgtttcgcccgcttcgatgaaccggctgtgaacggggattcgcccgacagtcccttccagcaaaaactcgccgcgctgtttgccgatgccaaagcgcagggcatcaaaaatccggtgatggtcggggcgattcccttcgatccacgtcagccttcgtcgctgtatattcctgaatcctggcagtcgttctcccgtcaggaaaaacaagcttccgcacgccgtttcacccgcagccagtcgctgaatgtggtggaacgccaggcaattccggagcaaaccacgtttgaacagatggttgcccgcgccgccgcacttaccgccacgccgcaggtcgacaaagtggtgttgtcacggttgattgatatcaccactgacgccgccattgatagtggcgtattgctggaacggttgattgcgcaaaacccggttagttacaacttccatgttccgctggctgatggtggcgtcctgctgggggccagcccggaactgctgctacgtaaagacggcgagcgttttagctccattccgttagccggttccgcgcgtcgtcagccggatgaagtgctcgatcgcgaagcaggtaatcgtctgctggcgtcagaaaaagatcgccatgaacatgaactggtgactcaggcgatgaaagaggtactgcgcgaacgcagtagtgagttacacgttccttcttctccacagctgatcaccacgccgacgctgtggcatctcgcaactccctttgaaggtaaagcgaattcgcaagaaaacgcactgactctggcctgtctgctgcatccgacccccgcgctgagcggtttcccgcatcaggccgcgacccaggttattgctgaactggaaccgttcgaccgcgaactgtttggcggcattgtgggttggtgtgacagcgaaggtaacggcgaatgggtggtgaccatccgctgcgcgaagctgcgggaaaatcaggtgcgtctgtttgccggagcggggattgtgcctgcgtcgtcaccgttgggtgagtggcgcgaaacaggcgtcaaactttctaccatgttgaacgtttttggattgcattaaggagcgaggatgagcattccattcacccgctggccggaagagtttgcccgtcgctatcgggaaaaaggctactggcaggatttgccgctgaccgacattctgacgcgacatgctgcgagtgacagcatcgcggttatcgacggcgagcgacagttgagttatcgggagctgaatcaggcggcggataacctcgcgtgtagtttacgccgtcagggcattaaacctggtgaaaccgcgctggtacaactgggtaacgtcgctgaattgtatattacctttttcgcgctgctgaaactgggcgttgcgccggtgctggcgttgttcagccatcagcgtagtgaactgaacgcctatgccagccagattgaacccgcattgctgattgccgatcgccaacatgcgctgtttagcggggatgatttcctcaatactttcgtcacagaacattcctccattcgcgtggtgcaactgctcaacgacagcggtgagcataacttgcaggatgcgattaaccatccggctgaggattttactgccacgccatcacctgctgatgaagtggcctatttccagctttccggtggcaccaccggcacaccgaaactgatcccgcgcactcataacgactactactacagcgtgcgtcgtagcgtcgagatttgtcagttcacacaacagacacgctacctgtgcgcgatcccggcggctcataactacgccatgagttcgccaggatcgctgggcgtctttcttgccggaggaacggttgttctggcggccgatcccagcgccacgctctgtttcccattgattgaaaaacatcaggttaacgttaccgcgctggtgccacccgcagtcagcctgtggttgcaggcgctgatcgaaggcgaaagccgggcgcagcttgcctcgctgaaactgttacaggtcggcggcgcacgtctttctgccacccttgcggcgcgtattcccgctgagattggctgtcagttgcagcaggtgtttggcatggcggaagggctggtgaactacacccgacttgatgatagcgcggagaaaattatccatacccagggttacccaatgtgtccggatgacgaagtatgggttgccgatgccgaaggaaatccactgccgcaaggggaagtcggacgcctgatgacgcgcgggccgtacaccttccgcggctattacaaaagtccacagcacaatgccagcgcctttgatgccaacggtttttactgttccggcgatctgatctctattgatccagagggttacatcaccgtgcaggggcgcgagaaagatcagattaaccgtggcggcgagaagatcgctgccgaagagatcgaaaacctgctgctgcgccacccggcggtgatctacgccgcactggtgagcatggaagatgagctgatgggcgaaaaaagctgcgcttatctggtggtaaaagagccgctgcgcgcggtgcaggtgcgtcgtttcctgcgtgaacagggtattgccgaatttaaattaccggatcgcgtggagtgtgtggattcacttccgctgacggcggtcgggaaagtcgataaaaaacaattacgtcagtggctggcgtcacgcgcatcagcctgaaggagagaacacgatggctattccaaaattacaggcttacgcactgccggagtctcacgatattccgcagaataaagttgactgggcctttgaaccgcaacgtgccgcgttgttaatccatgatatgcaggactattttgtcagcttctggggcgagaactgcccgatgatggagcaggtgatcgcgaatattgctgcgctgcgcgactactgcaaacagcacaatatcccggtttattacaccgcccagccgaaagagcagagcgatgaagatcgggcgctgttgaatgatatgtgggggccgggcctgacccgctcgccggaacagcaaaaggtggtggatcgcctgacgccagatgccgacgacacggtgctggtgaagtggcgctacagcgcgtttcatcgttctccgctggagcaaatgctgaaagagagtggacgtaaccagctgattattaccggggtatatgcccacattggctgtatgaccaccgcaaccgacgcatttatgcgcgatattaaaccgtttatggtggcggatgcgctggccgatttcagccgtgacgagcatttgatgtcgctgaaatatgtggccggacgttctggccgggtggtgatgactgaagaattactgccagcacctatccccgccagcaaagcggcgctgcgtgaggtgatcctgccgttgctggacgagtccgatgaaccgttcgatgacgacaacctgatcgactacggtctggattcggtgcgcatgatggcgctggcggcgcgctggcgcaaagtgcatggtgatatcgactttgtcatgctggcgaaaaacccgaccatcgacgcctggtggaagctactctcccgcgaggtgaaataatggatttcagcggtaaaaatgtctgggtaaccggcgcaggtaaaggtatcggctacgccacggcgctggcgtttgttgaggcgggagcgaaagttacaggttttgatcaagcgttcactcaggagcaatatccctttgcgaccgaagtgatggatgttgccgacgctgcgcaggtcgcgcaagtgtgtcagcgactgttagctgaaacggagcgactggacgcgctggtcaatgcggcgggaattttacgcatgggcgcgaccgatcagctcagtaaagaggactggcagcagacttttgcggttaacgtcggcggtgcgtttaacctgttccagcaaaccatgaaccagtttcgccgtcagcggggcggggcgattgtcactgtggcgtccgacgccgcgcacacgccgcgtattggcatgagtgcttatggcgcatcgaaagcggcgctgaaaagcctggcgttgagcgtcgggctggaactggcgggtagcggcgtgcgctgtaatgtggtttcgcctggctccaccgacaccgatatgcaacgcacgctgtgggtgagcgatgacgccgaagaacagcgtattcgcggctttggcgagcagtttaaactcggcattccgctggggaaaatcgcccgtccacaagagatcgccaacacgattttgttcctcgcctctgacctcgccagccatattaccctacaggatattgtggtcgatggcggctcaacgctgggggcataagcatgatctggaaacgccatttaacgctcgacgaactgaacgccaccagcgataacacaatggtggcgcatctgggaattgtgtatacccgtctgggcgatgatgtgctggaagccgaaatgccggttgatacccgtactcatcagccgttcggtttactacatggcggcgcgtcggcggcgctggcggaaacgctgggatcgatggccggatttatgatgacccgcgacggacagtgtgtggtaggcacagaacttaatgcaacacaccatcgcccggtgtctgagggaaaggtacgcggcgtctgccagccgctgcatcttggtcggcaaaatcagagctgggaaatcgtcgttttcgatgaacaggggcggcgttgctgcacttgtcggctgggtacggcagttttgggatgaacccgacagaattagatgagattgcaggaaaactcggttaacggagtgatcgagttaacattgttaagttaaatattggtttcaactccgatttacatggttgctgtgttgttaaattgtacaaagatgttatagaaacaaaatgtaacatctctatggacacgcacacggataacaactatgaacaaatcagggaaatacctcgtctggacagtgctctctgtaatgggagcatttgctctgggatacattgctttaaatcgtggggaacagatcaacgcgctgtggattgtggtggcgtcggtctgtatctatctgatcgcttaccgtttttatgggctgtatatcgccaaaaatgtgctggcggttgacccgacgcgtatgacgccagcggtgcgccataacgacgggctggactatgtgccgacggacaagaaagtgctgttcggtcaccattttgcggccattgccggagcaggtccgctggtggggccggtactggcggcgcaaatgggctacctgccggggatgatctggctgctcgctggggtggttctcgccggtgcggtgcaggatttcatggtgctgtttgtttctacgcgccgtgacggtcgctcgctgggtgagctggtcaaagaagagatggggccaaccgccggggtgattgcgctggtggcctgctttatgatcatggtcattatccttgcagtgctggcgatgatcgtggtgaaagccctgactcatagcccgtggggaacatataccgttgcgttcaccattccgctggcgctgtttatggggatctacctgcgctatctgcgtccggggcgtattggcgaagtgtcggtcatcggtctggtattcctgattttcgccattatctctggcggctgggtggcagaaagtccgacctgggcaccgtactttgactttaccggcgtgcagttgacctggatgctggtgggttacggttttgtggcggcggtgctgccggtgtggttactgctggccccgcgtgactacctctctaccttcctgaaaatcgggactatcgtcggtctggcggtaggcattttgattatgcgcccgacgctgaccatgcctgcgctgaccaaatttgtcgatggcactggcccggtatggaccggtaacctgttcccgttcctgtttatcaccatcgcctgtggcgcggtgtctggcttccatgcgctgatctcttctgggaccacgccgaagatgctggcgaacgaagggcaggcgtgctttatcggctacggtgggatgttaatggaatccttcgtggcgattatggcgctggtttccgcctgtatcatcgatccgggcgtgtattttgccatgaacagcccgatggcggtgctggctccggcagggacggcggatgtggtcgcttctgccgcgcaggtggtgagtagctggggctttagcattacaccagatacgctaaaccagattgccagcgaagtgggtgaacagtcgatcatttcccgtgcgggcggtgcgccgacgctggcggtggggatggcctacattctgcacggcgcgctgggcggcatgatggatgtggcgttctggtatcacttcgccattttgtttgaagcactgtttattctgacggcggtggatgcaggtacgcgtgctgcgcgctttatgttgcaggatctgctgggcgtggtgtctcctggcctgaagcggaccgattcactgcctgctaacctgctggcaacagcgctgtgcgtactggcgtggggctacttcctccatcagggcgtggtcgatccgctgggcggcattaacactctgtggccgctgtttggtattgccaaccagatgctggcagggatggcgctgatgctctgtgccgtggtgttgttcaagatgaaacgtcaacgttacgcctgggtggcgctggtaccaacggcctggctgctgatttgtaccctgaccgcaggctggcagaaagcgtttagcccggatgcgaaagtcggcttcctggccattgctaataagttccaggcaatgatcgacagcggcaatattccgtcgcagtatactgagtcacagctggcgcaactggtgttcaacaaccgtctggatgccgggttaaccatcttctttatggtggtcgtggtggttctggcactgttctcgattaagacggcacttgcggcattgaaagatccgaagccaacggcgaaagaaacgccgtatgaaccaatgccggaaaatgtcgaggagatcgtggcgcaggcaaaaggcgcacactaaagtcagagtgagggggggatgttggcgaatgttggcttagtgcccagggttccctctcaccctaaccctctccccggtggggcgaggggactgaccgagcgcgttgatagcatttgtaggccggataaggcgttcacgccgcatccggcactctttcagcaacatggttagcggaggccaagatgtttgattcactggcaaaagccggaaaatatttaggtcaggcggcgaagctgatgattggtatgcctgattacgacaactatgtcgaacatatgcgggttaaccatcccgatcaaacgccgatgacctacgaagagtttttccgtgagcggcaggacgcgcgctacggtggaaaaggcggcgcgcgctgctgctaaatttgtacgtcaggctttaaacgattccacttttttgaacgctgcacgcaacgtatctggtgtcagcgtgactggcaggtaatgaatggactccaccggacgcagggtgtgggcaatcactttgtcgatctccgcctgattattgatatccacttccagctccgccagtgtagtcggcagatgaaaacgctgatacgctccagttaattgcgccagcacatcatcctgacccagcaaggcgctttgcaccagaattccgtaggcgactttggtgccgtggagaaacttctcggtttgcggcagcacggtcagaccgttatgcacggcatgagctgccgccacacgcgtaaaacgatcgcccagaccaccaaccatcccaccaccagcaataatagcatccaccacatcgcaaaatgattgcgttaactgttgattttgctgatcgctcagcgcctgttcgctactgtttaacaagacgtcgcgaatggcttgcgcattattgatccccagtcgcacggttagcggcaacgtttctggttgcggagccagcaccaccgcttcataccatttcgccagcgtgtcaccgatccccgccagcagatattgttgcggtgcattgaggataatctccggttccaccagcaccataaaattggcgtcgtcgaaaatctcataatgcagcgcctgtccggcatcattataccagacggagagcggtgtccaggcggcgcaggtggcggcgatcgtcggaacggcaacaaacggcagaccgagacggcgggcgagggctttcgcggtgtcgagcagtgcaccgccaccgacgccaatcaccacgctgcggtcgtcaccggactcagccgccagttgttgtacatcgctttcgctgcaatgaccgcgaaacaaaatatgctttgcccctggcagtccaaacgctggcggaagtttggtttgcgccgcagcaatggcgcgtttgccgtagatccacaccgcgcgagaaagttgttcatcagtgaaaaaatcgtgcaggtgattgaaacttcctggatgtgaaaagtagttagccgggccgacgaccacgcggataggattgtgaggcatgttgtgttgtccttattgttttatttagacatctaaacgtcttgattgccaaatactagcatcgtgttatagtgccttcaacacgcaacttcgtcaggtacaataaaaatgacaaataaccctctgattccacaaagcaaacttccacaacttggcaccactattttcacccagatgagcgcgctggcgcagcaacaccaggcgattaacctgtcgcaaggctttcctgattttgatggtccgcgctatttacaggagcggctggcgcaccacgttgcacagggggcaaaccaatacgcgcccatgaccggcgtgcaggccttgcgcgaggcgattgctcagaaaacggaacgtttgtatggctatcaaccagatgccgatagcgatatcaccgtaacggcaggggcgacggaagcgttatacgcggcgattaccgcactggtgcgcaatggcgatgaagtgatttgttttgatcccagctatgacagttacgcccccgccatcgcgctttctgggggaatagtgaagcgtatggcactgcaaccaccgcattttcgcgttgactggcaggaatttgccgcattattaagcgagcgcaccagactggtgatcctcaacactccgcataaccccagtgcaactgtctggcagcaggctgatttcgccgctttgtggcaggcgatcgccgggcacgagatttttgtcattagcgatgaagtctacgagcacatcaacttttcacaacagggccatgccagtgtgctggcgcatccgcagctgcgtgagcgggcagtggcggtttcttcatttggcaagacctatcatatgaccggctggaaagtgggttattgtgttgcgccagcgcccatcagcgccgaaattcgcaaggtacatcagtatctgaccttttcggtgaataccccggcacagctggcgcttgctgatatgctacgtgcagaacctgagcattatcttgcgttaccggacttttatcgccagaagcgcgatattctggtgaatgctttaaatgaaagccggctggagattttaccgtgtgaaggtacatactttttgctggtggattacagcgcggtttctaccctggatgatgttgagttttgccagtggctgacgcaggagcacggcgtagcggcgattccgctgtcggtgttttgcgccgatcccttcccacataaactgattcgtctctgttttgccaagaaggaatcgacgttgctggcagcagctgaacgcctgcgccagctttagctatttaaccgtccaggcgcgggaatattgacggtcggcaaacaactcttgcaggccgttaatttgcttcaggcgcagcacttcgtcgctgtccattcccagctctttgccaattttattatcgtcccatcccaactggctaagttcacggacgatttccgacatggcggtgatttgatggcgtccacgagcgcgattatgacgaatagtcgcggcgatgcgttgattacgcgtaccttccagacaggtcaccggcaaataaccttttaagcgtaattttaatgatgatgagcctttaccaatttcatggcggtgaaaaccatccacgatttccatggcatttttatccgtatgtgtgaccacaatgggttgggtaaaaccatctatttcaatggatttttgcagcagttttttttcgggtggtgccacgttgtttgggttgtaatcattaggcataagttggctgtttttaacccacagaacgcaatccactggctcttcacgaaaggggctaacctgatggatcgccatgcggatttcattaatcgctttgatgcgatcatcttccggcaagctggcgagaaattgcgttaaatcctgcgttaatcgttgttgcatagtatcccccattcctgacgttttccttttatccgttcgttataacgctgatagttcttcgattttgtggggctaaatgataatgcccgacaccagtaatcgttattgagtaaaactttgcatatccgccgccaggaggggatatctttcgcgccaatgtccccttgctgggtttgtggaacctcgatgccttttttctgataccagtgcaaataaatggcgattttattgcggtaatgctcagctgttttttccggcatgctattgagcagcaataatgcatattcttgccagtctaaatgttctggcttgaggattttccgatgcccatagaaatgattgtcatgtccggcgtaaatgccgccactttttaccccgctgactcgtgcgcacatagcagcccagcgatccggttcgataacgtgatagagccataatccttgtcgttgctccgggccaaaaggttcgcaaattcgcatatgacgcagaggaacgcctgcctgatacattaggttatacagtgggttgcagagactttgatgatttgcataccaggtccagatatcagccactttccagtcgtaaatggggtaaatgtaccagctatgaccgcctggtgcggccgtagtccagggtttatcgtcggcaaaacgttgtttatttaaactggcgatggcgacaaaacggttgtaggactcatccgcacggatgccgatcatcatcgccgccggacgtttttgtgaaaaccattcggcaaactcacgtacaaattgttcgaaggtcatgcctggctggtaaaagcagaaaaagtcagggtcggttatcgcatcttggggaggttgacgtacccattcgacatcaggttcccagcactgccattcgggttggtattgtgaaagggaattttgcgtcgtaagcgggagcgcaacccagtaaaactcttcgatgacatcggtgtacaactcgcgcagggactgaacatagttaatggtgcaagagaattgcgcctcccagtcgataaacaaaacgcagatttttttgcccatttgtcgggcaagttcggctgtcagatgcagcattaaaccagagtctttgccgccagaaaatgagacacaaacgcggggtagggtgttgagtgtccaggtaatacgctctcgtgcagcttccagaatattgagcggaagaggaattttataaatagacatctgaagacgctctctgaacgttacagggtgatcagtgagataagtctgttaattataaagtaaacactgtaaagcagagtgttttatttttcattcgcgctgtgaataaatagatgaaagttatagtagctgtctgtagttatatatcaaaaactctcatttagacggtcaataaatcgggagaacaccaaattatttaaagaagatttattataggaaatgtaaagctttattgaaggtaacggatgttctagttttatctcttttaagttaagaaagtcacggtaggaattataaagttcataggggactattcccagtaaatctgtaactgcaatgctattaatgattgtcagcaaagaggaaccacgaaatgagattttgcgattcataaatctctcgtctatttccatttgaatatcatcaacccctgctgatttagatattaattgggtgaactcttctgccataatttgttcataagtgctattgtcagtaattcgtggatgcctattactacaaattagagtattgcgaatcgtatgcaatggcatgcaaatgacggaacggctgatcactggcatttgggtgatcaccagatcggctttgcggtgaaccaacagttcttcagcattctctgctgacatgaggatatcatggcactcaatctcgacagaggaatcttgccgtaggcagcggatcagcatactattattagagcaagaaatgagctgagggccgtagataataaagtttttctttagttcggacttattgactatattaattgtttgttcaaggcctctgagatttttctcaagatggtgatgcagatttaaccctgttgtcgtcggcgcgataccttttcctgagcgaatgaataaagggtcattaaattgcgcacgtaagcgttgtaacgactggctcacggctgatggggtgatatatagtgattcagcagctttgctaatgcttaaatgctggtaaatacactcaaatatgacaagaagatttaagtcgaactttttcaagtcgtagagattggccatacactactccggttatatttttcttccatgatatattcacttaatcaatgttttttgcgtatatatttttattgattatgtttttttgcttaactcaggattaagtttttctaaaatagcacagccacttagggcagagcgagcaattcatgcttttttaggatggttgaaaagcagggatatagttcaaccatccatgaattaccttttatttattccccataatgatattaagcgttttctgatcgggcaaccccacggcctgttgtagcgtattttccttactcatgtaatagatagccggcgtgacatttgcccccagatcgtccatcagtttctcattgtcacttaacactttcatttgctctgtacttacgtttgcaggcacgtttagcttaagcttgccaccagaggcttcatattgttgccaggtttttgcgggatctttggaggcaagaattgccgctgctgtcgccgggctttctggcttgataaccccaaccaacaatgttcttaattgcactttgccagaatctacccacgggcgcgcctgctgccagaactgtttacaatatgggcagaacggatcggcgaagacgtagacaatgaccggcgcatcttttttaccgtcgaggagccagtgggattgttccatccgttgccacatttcgcgtccggctggtgcgtaaatttctttttcgataagtgtgttactcaggttttcacctttctcgttgtacatgtaaccagagatagcgtgcttaccatctggagtcaggtagatggtgacgcccatatcctgatactttccgagataacctttcattcctccgggggcatcgaatgttttgatgattgtaatgccctgtttttcaatcgcttttactggagcaggaagttcctctgcgaaggcgattgcaggaagcagagccagtaaaagtatcttttttaacattaatttgtccttttcagtcagtgcaaaagtcgagtaaaaggcataacctatcactgtcataggtaagagcttagatcaggtgattgccctttgtttatgagggtgttgtaatccatgtcgttgttgcatttgtaagggcaacacctcagcctgcaggcaggcactgaagataccaaagggtagttcagattacacggtcacctggaaagggggccattttactttttatcgccgctggcggtgcaaagttcacaaagttgtcttacgaaggttgtaaggtaaaacttatcgatttgataatggaaacgcattagccgaatcggcaaaaattggttaccttacatctcatcgaaaacacggaggaagtatagatgtccttgattaacaccaaaattaaaccttttaaaaaccaggcattcaaaaacggcgaattcatcgaaatcaccgaaaaagataccgaaggccgctggagcgtcttcttcttctacccggctgactttactttcgtatgcccgaccgaactgggtgacgttgctgaccactacgaagaactgcagaaactgggcgtagacgtatacgcagtatctaccgatactcacttcacccacaaagcatggcacagcagctctgaaaccatcgctaaaatcaaatatgcgatgatcggcgacccgactggcgccctgacccgtaacttcgacaacatgcgtgaagatgaaggtctggctgaccgtgcgaccttcgttgttgacccgcagggtatcatccaggcaatcgaagttaccgctgaaggcattggccgtgacgcgtctgacctgctgcgtaaaatcaaagcagcacagtacgtagcttctcacccaggtgaagtttgcccggctaaatggaaagaaggtgaagcaactctggctccgtctctggacctggttggtaaaatctaaatttccttcgtctttcacgccatagcggcgttggcgtcgcccgctcaccccggtcacttacttgtgtaagctcccggggattcacaggctagccgccttgctctgacgcgaaatacttcggaaattcacctaattcttcgggtgctgcggcacccgattttcttccccgcaccatgatgcaagctgcatccaggtagccgcagaggccgcttgcatgatgatgtttaaagcccaggagataaacatgctcgacacaaatatgaaaactcaactcaaggcttaccttgagaaattgaccaagcctgttgagttaattgccacgctggatgacagcgctaaatcggcagaaatcaaggaactgttggctgaaatcgcagaactgtcagacaaagtcacctttaaagaagataacagcttgccggtgcgtaagccgtctttcctgatcaccaacccaggttccaaccaggggccacgttttgcaggctccccgctgggccacgagttcacctcgctggtactggcgttgctgtggaccggtggtcatccgtcgaaagaagcgcagtctctgctggagcagattcgccatattgacggtgattttgaattcgaaacctattactcgctctcttgccacaactgcccggacgtggtgcaggcgctgaacctgatgagcgtactgaacccgcgcatcaagcacactgcaattgacggcggcaccttccagaacgaaatcaccgatcgcaacgtgatgggcgttccggcagtgttcgtaaacgggaaagagtttggtcagggccgcatgacgttgactgaaatcgttgccaaaattgatactggcgcggaaaaacgtgcggcagaagagctgaacaagcgtgatgcttatgacgtattaatcgtcggttccggcccggcgggtgcagcggcagcaatttactccgcacgtaaaggcatccgtaccggtctgatgggcgaacgttttggtggtcagatcctcgataccgttgatatcgaaaactacatttctgtaccgaagactgaagggcagaagctggcaggcgcactgaaagttcacgttgatgaatacgacgttgatgtgatcgacagccagagcgccagcaaactgatcccagcagcagttgaaggtggtctgcatcagattgaaacagcttctggcgcggtactgaaagcacgcagcattatcgtggcgaccggtgcaaaatggcgcaacatgaacgttccgggcgaagatcagtatcgcaccaaaggcgtgacctactgcccgcactgcgacggcccgctgtttaaaggtaaacgcgtagcggttatcggcggcggtaactccggcgtggaagcggcaattgacctggcgggtatcgttgagcacgtaacgctgctggaatttgcgccagaaatgaaagccgaccaggttctgcaggacaaactgcgcagcctgaaaaacgtcgacattattctgaatgcgcaaaccacggaagtgaaaggcgacggcagcaaagtcgttggtctggaatatcgagatcgtgtcagcggcgatattcacaacatcgaactggccggtattttcgtccagattggtctgctgccgaacaccaactggctcgaaggcgcagtcgaacgtaaccgcatgggcgagattatcattgatgcgaaatgcgaaaccaacgtgaaaggcgtgttcgcagcgggtgactgtacgacggttccgtacaagcagatcatcatcgccactggcgaaggtgccaaagcctctctgagtgcttttgactacctgattcgcaccaaaactgcataagaagaagtaagattcacctgcaattgcttagccgccggggtcaaacctggcggcttttttatggcattaaaaagccccgccgggatggctccgggcagggcgggatacttattctggcaattaacgcacaaccagcaccggcagattggcgtggcggatcacgctcgaggcgttagaacctaacagatgggtcgaaatcgatgggttgcgagaaccaataactacaacatcagcccccagttcttctgccaactcattgacttcatcccgcacgctaccaaaacggacatgttgtttaatgcgggaaggatcgatggtgaagtggctgaccatcgtttgcagacgttcttgtgcttcatgttgcagatgctcttcaaaacgacgcacatcagcggcaaaacggtgcaggctcaggctggctgacccgggtagtacgtgaagtagatgaataactccgtcatcctgggcgaggaattcagcgtggcgaacagctttgtcgctcaattccatttcaaatacatcaactggcataatgattgtcttatacataaccctttctccctgttaatcatgaacaaatcattcgccatgattataatatttatccctgatatttgtctggttctttttccttacgaactgtttctgtgatgaatatattctcactgaacaccaggaattctcccaaaacctgtggtaccgcccgttttcccgctgtgatagctacccttaaagactgactcttttttgaactgtctctggaggttgcatgaaagcattgacttatcacggcccacatcacgttcaggtagaaaatgttcccgatccgggcgttgaacaggcagatgatattattctgcgtattacggcaacggcgatctgtggctctgacctccatctttatcgaggcaaaatacctcaggttaaacatggcgatatttttggtcatgaatttatgggggaagtagttgaaaccggaaaggacgtaaaaaatttgcaaaaaggcgaccgagtggtaattccgttcgtcattgcttgtggcgactgttttttctgtcgattgcaacaatatgccgcctgcgaaaataccaatgcgggtaaaggcgctgcgctcaataaaaaacagataccagctccagcggcattgtttggttatagtcacctgtatggcggcgttcctggtgggcaggcggaatatgtccgcgtccctaaagggaatgtggggccgtttaaagtaccgcctttgctttcagatgataaagcgcttttcctttctgatattctgccaacggcatggcaggcagcaaaaaatgcgcagatccaacaaggttcaagcgttgcagtctatggtgctggtcctgtgggattgttgacaatcgcctgtgcacggttgctcggtgcggaacagatttttgttgttgatcatcatccctaccgcttgcatttcgccgccgaccgctacggcgcgatcccgattaattttgatgaagacagcgatccggcacagtcaattattgaacaaacggcaggtcaccggggcgtggatgcagtaatagacgccgtcggttttgaagcgaaaggcagcaccacggaaacggtgctgactaacctgaaactggagggcagcagcggtaaagcgttgcgtcagtgtattgcggcggtcaggcgtggcggcattgttagcgtaccgggcgtctacgctggatttattcacggtttcctgtttggcgacgcctttgataaagggttgtcgtttaaaatgggacagacccacgttcacgcatggctgggagaattattaccgttaattgagaaaggattactgaaaccagaagaaattgttacccactatatgccgtttgaagaggccgcccggggatatgagattttcgaaaaacgtgaagaggagtgccgtaaggtgattctggtacccggtgcacaaagcgcagaggcggcgcagaaggcggtttcaggtctggtgaatgcgatgccggggggaacaatatgatcgtcaggagtggttttcgaggtaaaggacagccatgacgataatcgccgccataatcagaaatcctatcaggatgtaaaatgcttctgccatggttattcccacaaacgaaacggaataattttgcagcaaaagtgaacagtgagaaccaggaaaaattgctgattttgcgtaaagaggatgcgagtgcatcctctgggcaaagcgagttatcgcttgtgcagatgggattaaagcaggtagtcgccagcagcttctggctggtattcgagttccagcacttcaaggtgggttgcaacgccgcccggaagttcccagtgaatggaatcgccaacgcgcagccccagcagtgcggcacctaccggagccataacggaaagctgagtattgctatcggtcatttttgccggatacaccagcgtgcgcacacgcacttcgccatcgctaagattgcggaatttaacccggctgttcattgtcaccacgtcgtgtggcatctcttctggcgaacacatttgggcgcgatccaactctgcgtttaacgcgtcggcgattggcaaaccagcataggcgggttgctccagcagaatatcgatgcgttcggcatccaggtcgttaatgatgatagttggtctggacatttttactccatgtcgtcggtgctgcgagtgtcgcagataaacatacccaaaagaaaaccctcaccgtcaggcggcgagggtttaactcacatgatgatactgactgttgctcactctttgaagtgatttgcgtcacattcagggaattcctcaatgcagcgcattatgtataaatcttaatcgccttggtttatggaagacgaattagcgtgttttgtaaatcagatgattaataacccgctttatcaatcacaaaggttttgccacagttacctgggtgaggttgtggcaagaatgagtttgcagaaagcggagcgttgatggcgtcagctttgatcgagatctgaatttcagtcaaatacgcagggttaccctggcacgttagcttaactgctttcacgttctcttttccccagcttttggcaaaggcggcgtcaaagtcacggcggctcactgttttaccgtaattatccgcaaggaattttccggcttcgctctctttaatttcttgattcaggcgtaccatcgtaccgaagtatgcgtccggatcaaaaccaaagcaggcaccgtgtttggcatattcgtagcgttccaggcaggaacgtccgccagctcctggcatgacttcacttagtttagcggccgtttccagtgataatccggtttccggcgatgaacacattcggctggcgcgcgcttctggtagattcgggattgggcgagtagcgcaaccgaagcgcatccagcggcgttcatcaacaccacgggcagcaaccgatttaggcaatcctggccacagaccatgtacggtcagaaaatcagctttgttggtcgtttcggtttgcaggcgacattcatctcgttcgttacgatttcgatcgtgttgactctggcaaaatccggtttgccaggagagggccaggacatagcgatcaaaatcgccatactgttttgcctgcaacgctaaggcgttggcagaagagaagggaagcagagaaaccgcgagcaacgcggcgttacgccagaatgctttcataatgggtgtggaactcatacatacactgaatactatctattaaatcataaaaaagcccgccaggtgggcttacctggcgggcgtgatgatttattcagcgtttggcgaacgtattagttccacatggcgagaatcggccagccaaccaacagcaacatagagatgtaaatcaccccgaagattgcgccaagacgccagtaatcttttgatttcacatagccacagccgtaaataatcaccccaggaccggttgcatacggcgtcagacagcccatgataccgatagacagcaccagcaggatacacagttgttccattggtacgcccggaatacctttaccgacggccagaataaccggcagcatggttgcggtgtgcgcagacaggctggcaaacaggtagtgtgcaaagtagaacaccagaaccagtacaatcaccgttgcgtttggtgagaatccttccaggtgcgtactcatggtaccggcgaaccagtcaataaaaccagaacgagtcaggccgttagccatcacaaccagagttgccaggttgaccagtgtgttccatgcgctgttatagcgggtaatgtctttccaaggcacaacgtgcagggccagcattagcgaaactgccagcagaccaaccgcagtagcattaatgacttcactgccaaatacccacaaacctaagctgagcaatacaaggccaatcagtgtccactctctgcgtgtcagcgcacccatggttttcagttcatcacccgcccaggttgccacttcttcactgtgtgtgatttccggtttgtacagcacgtaggaaagccacggcgcaatgataagcaagataaccccaaccggcaggaagcagaggaaccactgcaaccagctaatctggataccggcaattttgctgacgaactccagacccagcacgtttggtgccgcaccggtgacaaacatggacgaactcagactggtactaatgaccatcatccacatcaaatagccgccaatacgacgcgcggacggatcgttcgggaatgatttaaacaacggcggcaggtttttaatgaccggaaaaaccgtacccccggtacgcgcggtgttggaaggtgtaaacggtgccagcagaatgtcgataatgacaatcgcataacccaacgtcagcgtgcgtttgcccatgaatttcaccaggaaaagggcaatgcgacgacctaacccggaaacttcataccctaatgcaaaaataaatgcgccaaataccagccataccgtggtgctggaaaaaccagccaggccccatttcagcgcctgtttttgcgcattaaacgctgggtcagctaattctttggcatcaaagagcaggtaattactgccaataacgcaaatagtaaccgcaataaaactgatcgctgttgccggaattggctcgaggatcatgccgacaatcattgccacaaacacagcgaagtaatgccatgcctgcggcggcataccgtcggggacagggataagaaacatgacacccatcaccaccagtggggccaatagtttccatatattatcttttgctaaagacatacgggttctccgaaaattaatatttccaaatttatcaagtgcttaaataattaaatctgtgctaaaaaccaggtaaggatcagtaggtcagcactgccgcctggactgagatttcgttcgatacactccctgtcgaactgccggagataatcgagatcggcgggggttcgaatgccccctttttgcaataatgtttgcgcctcgcgctgtagccagcgcaggcccccctcgccaccgcgcgatgcaacgttggtatcgccgttgatcgccatcagtaggagcaaggtatcgagcaatgccagttcaggatctaacccctgatccagcagagtgaggtaatgcggcaaggcgtgattgatcaccagtggataacccgcttcggcttcaccgcgtgcgccggtaaggccaagctgttggtacaaccgttgacctgccgtcagttgtgaattattggtacgcagttcgcgatcggtcaggccacggcagaaacttgccgccgtagaacaaacggttgttggcgttaccggttggttgagttgaagcaaacggccaattgccgcacatagcagccctaaagaaaaaatgctgcctttatgcgtgtttacgcccgcagtggcgcggaacatatcaccttcgcaagccataccaattgggcgtaatccgtggagtaccgcttctggtgccatttccgcactacaggcaccaaattcaatgaaacggggtagccagccctgaatcgccagcgcgctgcggtggaaatcttccagcgccatatctttgtgcgcaccgcagttaatgcgatccacgaggcctggtttcggtgacagattgacttcagtcagcatggcgcgccagcccagcagggcgtactcatcgattaatgacgtcgcaagctttgtggttttagttgacgttgcaggcatcgacatcgttcagcagtgcctccatgcggttgagtaaatcggtcagttgatgggtttttccacgcgcgcagacggctgcgctttgttcgcacaacaggcagcggcgaggcggcagtgaatagtcgcggcgggagagaatttcgccttcgggcgtcaggacatcgatatcccataaccgcccgagaggatgactatgttcaagctcaatggtggcgagcttgaggtcgcgagccggggcggcaatgctcaacatgccctccggcccgctggcggaaaccagtgcagcctgctcctgaatttgccagccctgttttgcggctaaggcacgcaaggctgtcacgccatgattaaaaattcggcgtgtgacctcgctgtctttaatcggcccaggcgcaaccacggtaaaggagaccagtggaacaggatggcgcttgagccagacgtgttgccgtgcttgcctttcatcccggctgacgagcagctcgggaattgataccgcatggtggctggcgagttcaggaagcaggtgcatggcttattccttcacctgatgcacaacatcgatcaccgagccatcgcggtaacgcacaacggcaacgacgcggtctgtgaattcaatcggctgtggttcaccggtcagcagacgcgcacgttcgcgcagccactcaatggaaaccactttaatgcccgcttcctgcagacgttctgccagttccggacgtgccgggttaactgcgataccgtggtctgtgaccagaatatcgacactggagcctggggtgatgcaggtcagtacgttatccaccagagtcggaatacgaccgcgtaccagcggcgcgacgatgatggaaagcgcagaggcaatcgcggtatcgcagtgaccaccggaagcaccacgcagtacgccgtcagagccggtcagcacgttaacgttgaactgggtgtcaatttccagcgcgctcagtaccaccacgtcgagacgatcaaccgatgcgcctttcgaaccccagttagcgtactggttggcgctgatttcgatgtgattggggttacgggccagcgattgcgcagcatggctgtcaaagctctgcacatccagcagtttgcggatcagacctttttcgtgcaggtcaaccatcgtcgcggtaataccgccaagggcgaagtcggcgcgaatatcgcggctacgcattttgtcttccaggaaacgggttaccgccagcgatgcgccgccggtgccggtttgcatggagaaaccttctttgaagtagccagagttgacaatcacatccgcagcgctacgggcaataagcagttcgcgcgggttagtggtcatacgggtcgcgccagcgccgatttttgcagcatcgccaacgcggtcaactttgacgatcaaatcaacctgatcttgctcaatgcttgccggattatgcggataaggcagcagttcttcggtaagcatcacgacctgttttgcgttgtcggcatcaactattgcatagccgagggagccgcagcaggctttaccggtgtagccgttggcattaccgaattcatcacaggacgggacgccgaggaaagccacgtcgatattcagttcgccgctctgtaccagatgcacacgaccgccgtgagagtggatctgcaccggttctgccagcagaccacgggagatctcttccgccagtggaccacgcaggccggaggtataaatgcgggtaaccacgccctggcgaatgtgttctaccagcggcgcatggcaatcactcagggagctggacgccagggtcaggtttttaaagcccatcttcgcgatgacgtccatcaccatattgacggtcaggtcaccgccacggaaagcgtgatggaaggaaaccgtcatgccgtcctgtaaaccagagcgacgaatcgcttcttccaggttggcgcacagtttgcgatcgcgcgctttttcagcctggtaggtttgctttggcgagttctggaaagcggcaagatcgcattcagcgcgacgattccaggccgctacccgttcttgtcgttgagattgttcaattttctgcgtcattttgattgccttattcttcgcggatgccggaaagttctgcacgggagagcaccagacgggcgcgatcgataaccggaccgtccaccatcttgccgttcagggaaaccacgccgaggccttcgcgagcggcggcttcagcggcttctacgacgcggcgggcgtgatccacttctttctgggtcggtgcgtagaggttgtgcagcagatcaatctgacgcgggttgatcagcgatttgccgtcaaagcccagctgtttgatgtgggcggcttcttgcagaaatccggcttcgttgttagcgtcggaatagacggtatcgaacgcctgaatacccgcagagcgcgcggcctgcaaaatggaacagcgtgcgaacagcagttcagttccttccggggagcgttctgtacgcaggttgcgcacatagtcttctgcaccgagggcgataccgatcaaacgctcggaagcgtgagcgatttccactgcgcgggtaatccccagcggagattcaatcgccgccagcaggccggtgctgccgggttcacgaccacaggctttttcgatacgcaggatctctttttcaatatccagaacatcctgagcggtatcggttttcggcagacgcacaacgtccgcaccaccgcgaacgacggcttccaggtcgttaacaccccattcggaatccagcgcgttgacacgcacaatggtttcaatatcgcgatacagcggatgttgcagcgcgtggtaaaccatgcggcgggcggtgtctttttcacgcaatgctacggagtcttcgaggtcaaacatcagggcatcagccgggtagatgaaggagttgctgaccatcgcggcattggcaccaggcacaaacaacatgctgcggcgggtgcgagttttacgttgttgcagcgaagcggaaatcattggcaatcctcccatggcagagccgggataccgctggcgcgtgccagcagggcttccagtcgtgcacgtaaaatgcagtccagtgcgcctttgtcatcgacattcagctgtacgccgcgcacgttgtagcgggcgagaacgtccagaatggtggtgcgaattgcatcgccaaactgtttctcaacgctgctattgatttgcaggtcgatatcctgcgtatcgagtggggcgatgcgtatcatcacatccccagactcaagggtgcctgcaacggcgggctggtttattttcatttttcacctgtttctcatgcgggggtcttttgacgagctgccgcgtcctggcgggagtgctcaagcaggttctgcaaataatgcagcgtgactgcagggaccagcggcgcgatagccgtgagatcgtttttcgccagcagttgacgtacccgggaagcggatatcggcatctcctggtaacgcagccgctcaatttcaaccagttcgatgggcggtgcggagatagtcggcgtttccagccagtagcgcatatcctggttgtactgggcggtaacgcgacaaaagggttcagtaccgacaaagcggtgagttacacccagcgcgggagcgaggtactgacggaaaatcttcagatcaatttcggtgtaacaatggttaatgacgctctgttctttaatgaagtagcaagggaacgtagcgcgggagatgatgtattcggagccacgatgcacagtcaggcgtggaatatcggcggtgccttttaacaccaaatccagccggtcttcataggggaagcgtgaagaatcttctttgactaaaaacagatgcaaccagtcgcactgtgccgcagcctgttgaatcagataacggtgaccattcgtaaagggattggcgttcatcacaatgcagccaatcttgttccctggatgacgaaattttttcagcgattcggcatagcgtttcagtcgcgtggcgctgttttccatcagcaccatcacgccgggtacgctggtcagcgtggaaaaaccgcactggcggaacagcgcctcgtattcggttttggtataaataaacagatgcgtgctgtgccgctcataggcgaggtttatcaattcagtggctaatgtcagcgccagtccttcaccgcggacggattcactgatagcaacgcatttaataatatttccggcaattccaccgcacgcgataagcttttcatcgcgggttacggtaataaatacttcgactgtggtgtcaacgctcaaatcattttcatgcaggaattgggcgatttccgccatttttttattttctgaacgttttacgcgggtgaaaatatcattgccgaacataataaatagtatcctgaaggtgcatgttgttatcgatttgcaacgaatgttgttcaatgttgcaaactgataaccttttattttcacttgggagaaagggggtgatcgaggtatatctttttctcctttcgctatacatcctaaggagtatttcggcgtgaaattttgatttatttcacatagagttagtggttttttatttatttaatgattttaagttttttaattaatgtaattacgaaatgactcgcaggtttaagtgatttaattgatttaatgaataaaatttgccacgatcataattaatatctatgtattttgattcaacattttaattacatccgtcaaagaggctcgggacaacccgcaaggaaaacaatgttgcagcttaacgagaataaacagtttgcatttttccaaagactggcatttccgctgcgtatctttttgctgattctggtgttctcaatatttgtcattgcagccctggcgcaatattttacggccagttttgaggactatttaacgcttcatgtacgcgacatggcaatgaatcaggcgaaaattattgcctccaatgacagtgtcatctctgcggtgaaaacgcgtgactacaaacggctggcgaccatcgctaacaaattacaaagagataccgattttgattatgtggtgattggggaccggcactcgatccgcctttaccatcctaatccggagaaaattggttatcctatgcagttcaccaaacagggcgcgctggagaaaggggagagctacttcattaccgggaaagggtcaatggggatggcgatgcgcgccaaaacgccaatctttgatgacgatggaaaagtcatcggcgtggtgtcgattggctacctggtgagtaaaatcgatagctggcgggctgagtttttattaccgatggcaggtgtgtttgtcgtgctgttagggattctgatgttgctgtcgtggttcctggccgcgcatatccgtcggcagatgatgggcatggagccaaagcaaatcgcacgcgtggtccgtcagcaagaggcgctgtttagttcggtttatgaagggctgattgcggtggatccgcatggttacattaccgccatcaatcgtaacgcaagaaagatgctggggctgagttcccccggacggcaatggttgggtaaacccattgttgaagtggtcaggcccgccgatttctttaccgaacagattgatgaaaaacgtcaggatgtggtggcgaactttaacggtctgagcgttattgccaaccgggaagctattcgttcaggtgatgatttgctgggggccattatcagctttcgtagtaaagacgaaatttccaccctcaatgcgcaactgacgcaaataaaacaatacgttgagagccttcgtacattgcgacacgagcatctcaattggatgtcgacgctcaatggtctgttgcagatgaaagagtatgatcgcgtgctggcgatggtgcagggggagtctcaggcccagcaacagcttattgacagcctgcgcgaggcgtttgccgatcgccaggtggcggggctgctttttggtaaagtgcagcgcgcccgggaactggggctaaaaatgatcattgtccccggtagccagctttcgcaactgccgccaggactggatagcaccgagtttgcagccattgtgggcaatttacttgataacgccttcgaagccagcctgcgtagcgatgaaggaaacaagatcgttgaattattcctcagcgatgaaggcgatgatgtggtgattgaagtcgccgatcagggctgcggcgttccagagtctctacgagacaaaatatttgagcagggggtcagtacgcgtgctgacgagcccggtgaacatggcattgggttgtacttgattgccagctacgtaacgcgctgcggtggtgttatcactctcgaagataatgatccctgcggtaccttattttcaatctatattccgaaagtgaaacctaatgacagctccattaaccctattgatcgttgaggacgaaacgccgctggcagagatgcatgcggaatatattcgtcacattcccggattcagtcagatattactggcgggaaatctggcgcaggcccgaatgatgatcgagcgttttaagccggggctaatcttgctcgataactatcttcctgacggtagagggattaatttactgcatgaactggtgcaggcgcattatcccggcgacgtggtgtttaccactgcagccagcgatatggaaacggtgtctgaagccgtacgttgtggtgtatttgattatctcattaagcccattgcctatgaacggctggggcaaacgctaacccgtttccgccagcgtaaacatatgctggaaagtattgatagcgccagccagaagcaaattgatgagatgtttaatgcttatgctcgcggtgaacctaaggacgagctaccgaccggcattgaccccttgacgctaaacgcggtgcgaaaactgtttaaagagcctggtgtgcaacatacggcagaaacggtggcgcaggcactgaccatcagccgcaccactgccaggcgttatcttgaatattgcgccagccgccatctgattattgctgaaattgttcacggcaaagttggcagaccacaacgcatataccacagtgggtgacatgataaagccggaggaaacttgcctccggcattactatttacttgcctgtgaccgctgctgccgttcctggcaccatcagctctgtagcaacgataacaatcaccaaaccaacaagcaccggtaccgaggtgcgttttacgacttcaaacggcgagatcttcgccatcccggcaaccgcaacgactacgccagaaacgggcgaaagggtacggccaaggtttgacgcctgcagcatcgggatagtcaaatacgccgggttaatgccggaagagtgcgccagtttcgggatcatctcaacaaacgcataaaacggcgcattgcctgaaccggtcgtgactgccgccagcattgtcagaatcaccaataccagcatcaggatgatactcgccgaaccaaacgaggtagcgatagaaatcagactttgaataaagccgatggtgctaagcccctgagcgaataccccagcggcaaccagcagcatcaccacgttagcaaacgcatctgccatcccgcgataagccacttccagaccagagaaaactttctgggtattaaagctgcggaggaactccagaatggaggcaatcagcatacaaatcaccagaatagtgatgatgtgtaattgcggaccccatttaccgtcaaaaatcagtacaccgatgatcggcgtgaacggcaaaatggcataaaacgcaggagcagtggtggtgatttcactgacatctaacatttcatgagagatgtgctcttttttatccagataacgttgccagaagaagtgggcgatcgccatgccgataattgcagcaattgagataggcagcgtcgttttgaaggcgaagtcaatcagcgacatttcggaagcttgcgccgccagcaccacatcccctgaagtcggtgcgagaataatcgccgccggggaggcacaaatggcagcagctgcgccacgactgataccaacgtttaccatcaccggaaatagggttgccatcagcaaaacacccagaccggttgcggaagagacggccagagacatcagacaggcgacaaaataggcggcaatcatcagcaggtaaggggagttaatatactgcaatggttttgacgccagcttgaccaccatatcattcgcgccgatatgggtcatgtaagcggcaaatccacacagcatcataatcatcatgccgaggtcgccgccgcggctcattagtaatattttaacgtattcaacgatatccgtggcgctgtagcctgttgaagcctggctggacggtaacactttgtgccccataatggcactgataatcagcaataacaggccaccgacaaataacacaccagtggcggaataccctttaatgatgtagcgagctacacccacaataaccacaaccccaataaggagctcaatgaatgtcagcataatttttcctgtctccaggccccaaagtaaataataaaaaattcctaaagcttaaggaaaaaatatgcccaataaattggcgatgaatgctgattaaaatcaagaaaaactgccattaagacattgaagttgctgtttttatacatagataacaaaacgcatatttagcggttggcaattatcacataataatgtgtgcaaattgatggtggattgatgcaaatttgttaattgcaatggtgttagctgcggctgtgcgctcaaaaaataatctaatatgagcataggttgacgatatatattatatacttcgttaagatgattgttgtatctcgttaaaaaataaaataatttttccttgattgcattttgtcatcaaaaaagacttggtttttcttttttgactattcccatcgcagaaaacgacgcatcatctttaatcgatgcgcggaaatatttaacttgaacaagcggaaataaatagagcagctattcagattattctttatgttgggtctattaaggttatgttaattgtagctttgctatgctagtagtagatttttgataaatgttttatggtcacaaatgaacgtgagtaaatatgtcgctatcttttcctttgtttttattcagttaatcagcgttggtaaagtttttgctaacgcagatgagtggatgacaacgtttagagaaaatattgcacaaacctggcaacagcctgaacattatgatttatatattcctgccatcacctggcatgcacgtttcgcttacgacaaagaaaaaaccgatcgctataacgagcgaccgtggggtggcggttttggcctgtcgcgttgggatgaaaaaggaaactggcatggcctgtatgccatggcatttaaggactcgtggaacaaatgggaaccgattgccggatacggatgggaaagtacctggcgaccgctggcggatgaaaattttcatttaggtctgggattcaccgctggcgtaacggcacgcgataactggaattacatccctctcccggttctactgccattggcctccgtgggttatggcccagtgacttttcagatgacctacattccgggtacctacaacaatggcaatgtgtactttgcctggatgcgctttcagttttgagacaaatgaagttttagtaacttctttaaaatcaatagctaaaataagtaacatcaaaaataacgcgacttttatcactttttagtaaagttacactggacaaagcgtaccacaattggtgtactggtaaccgacacagcatttgtgtctatttttcatgtaaaggtaattttgatgtctaagattaaaggtaacgttaagtggtttaatgagtccaaaggattcggtttcattactccggaagacggcagcaaagacgtgttcgtacacttctctgcaatccagactaatggttttaaaactcttgctgaaggtcagcgcgtagagttcgaaatcactaacggtgccaaaggcccttctgctgcaaacgtaatcgctctgtaagatacgtcagcaagaattcaaaacccgcttaatcagcgggttttttttggtctttagtgtgcggttgaggccgaaaacagccagaatgccagtgcggtcatggcaaaagaccccagaaggttgacgaaaacgttcagtaatgcccagccaaagcggccctcttgtaacaaaaacaccacttctgccgaaaatgttgagaaggttgttagaccgccacaaaatccggtggtgattaatactttccacactggatcaatgttcgtcatcctgctgaaccatgcgaatcctattcctatgatgaatgccccaatcaggtttgctgtcagcgtccccaacggaatcgcctgatgcagtgggttaaatcgcatacttaacagccatctcgccacgcttcccgtaccaccgccaataaaaactgctaaaagaagttgtaacactgcaaaatcctgctatttgatttgtatgagtgataagtgtaacgccgaataatcgtcgttggcgaattttacgactctgacaggaggtggcaatgctggttgccgcaggacagtttgctgttacatctgtgtgggaaaagaacgctgagatttgtgcctcgttgatggcgcaggcggcggaaaacgacgcatcgctgtttgccctgccggaagcattgctggcgcgcgatgatcatgatgcagatctatcggttaaatcagcacagctgctggaaggcgaattcctcggactttacggcgagaaagtaaacgtaacatgatgacgacaattctgacgattcatgttccttcaacgccggggcgcgcatggaatatgctggtggcacttcaggcaggaaacatcgtcgcccgttatgccaaactgcatctctatgatgcatttgccattcaggaatcacgccgtgttgatgctggtaatgaaatcgctccgttactggaggtggaagggatgaaggtcggtctgatgacctgttatgacttacgctttccagagctggcgctggcacaggcattacagggagctgaaatcctggtacttcctgccgcctgggttcgcgggccgctcaaagagcatcactggtcaacgttgcttgccgctcgtgcgctggataccacctgttatatggtggcggcgggggagtgcgggaacaaaaatatcggtcaaagccggattatagatccctttggcgtcaccattgcggcagcgtcagaaatgcctgcactcattatggcggaagtgacgcccgaacgtgtgcgtcaggtgcgcgcgcaactgcccgtcttaaacaaccgtcgctttgcgccgccgcaattattatgatgtttttttactcggcgcttgattcaccttgttacagattgctattgtgtgcgcgcgtcgaatgaccgttaatattctctggtttttaaggcgcgttctgttgccggttatatgtcaagaaggtatctatgggtgagattagtattaccaaactgctggtagttgcggcgctggtcgttctgctgtttgggactaagaagttacgtacgctgggcggagaccttggagcggccattaaagggttcaagaaggcgatgaatgatgacgatgctgcggcgaaaaaaggcgcagacgttgatcttcaggctgaaaagctctctcataaagagtgacgtggcgagcaggacgctccctcaatatcttgttcgatacaaaaaacccgcttcaaaaagcgggttttttatcagacagatgtaagtaattattacaggattacttaacttccatccctttcgcctgcaaatcggcgtggtaagaagagcggacaaacggaccgcatgcagcatgggtaaagcccatcgccagcgcttcggctttcatttcgtcgaactcatccgggctaacgtaacgttgaaccggcaggtgatggcggcttggctgcaaatattgccccagcgttaacatcgtcacaccatgacggcgcaggtcgcgcattacctcaataatttcttcattggtttcacccagtcccaccatcagaccagacttggtcgggatttccggatgcgcttctttaaagcgttccagcagcttcagcgaccagttgtaatctgcaccaggccgtacctgacggtaaatacgcggtacgttttccaggttatggttgaacacatctggtggcgttgcagtcagaatatccagagcacgatccatacgaccgcggaaatccggcaccagagtttcaattttgatttgcgggcttttttcccgaatggcagtaatgcaatccgcaaagtgctgggcaccgccatcgcgcaggtcatcacggtcaacggaggtgataaccacataacgcagcgccatatcggcaatggtctgcgccagtttcactggttcattggcatcaggagctaccgggcgaccgtgggcaacatcacagaacggacaacggcgggtacaaatagcgccgaggatcataaacgttgctgtgccgtggttgaagcattccgccaggttagggcaggaggcttcctcgcagacagaatgcaggccatttttgcgcattgcggctttgatgccctggatacgtgtagagtccgctggaagcttgattttcatccattccggcttgcgcagcagggcttcgcgctctgttgccacgtttttaaccgggataagggccatcttatcggcatcgcggtatttaacaccgcgttccatcacaatgggtttactcatagcgtgcgtgttccagttgcgaattacgaaggaaagcgtttcaattcaatagattgttgtaattatcaactatttttgaattaacgactggcagtatatcattgaaacggacctgaaagcagccaaagcggtcgcgaaaatgtaaaattgttgttggattgtgccattttatcgttctgcgctgtgatctggctgtaacaatactttttcaaaatgcattacggataacatctattactccgtgcaggatgggatcacgcaggctgaatttgttgtagtggatagagaaatctatttgctcctcatttaaggacggaaaaggcagtttttccagcggccagcagcggctaaacaggttataaaaacggctgggaataatcgctaacatgtcactgttggcaaccagtgcagcgattgtcaaaatgttgtagctggtgaaattgatttgccggtccggaaacatttcttgaactctctgccgcagaccgctgaaattttgctcttccggtaacagaagtacatgcgcagcgttgtcgatagtctctctgtcatcttctaaagagagtagtggatttccctcgcggcaaattaacaccatattgtcggtgaacagaacatgatgttgcaccgtacgattggtgcaaaacatgttatcgatgatgagatcggtttgaaactgactgagttggttttccgcgtcgctgatgggcgggttgcgcagtaaaagctgcggatagtgagttttaatcgcccgatagatgacaggaaggaccagtgctccgaccgagggagtggtcgcaatagttatcgttcgttgcttatcatagcttccttcgatatccagcgcgccaagaatggactcaaggccctgactgatatactcatgtagatgcatcgcaaatgcggtaggagtgacaccctggcctttgcgaataaacaatgggtcagggaatataacgcgcagtttctgaatagactgactgattgccgagggggtcagattaagcactttcgctgcattaacgatccctttatgtacatatacagcttcaaaaatagtcagaaggttaagatcaatatttcgtaaggttgtaaatatttgtggtttaccttctgacgactttctgcttaaacagggttcaatttgattattactatccacgcacttactccaattttattcatggaaaaataatatttaaaaaattacaataatcttatgtctaattggaacggaacgcttttgctcaccataatcaactatttcaataggttaatcaatggggtgagttacggagcaaggcgtggcaccgcatttctgcaagtgataaagaaaatatacaaacgcgaaggagatgtaaagcattagcagatattatgagtaatgacccagtgtaaattgggccattgatgtatggaattaagcggtaatatattcgaagtccggattgtttagtagcgctaaaatattttccagtaaacgtggagcaatattattagtcgtcgcttcgggtttccattgtgatattttagccatttccattccggcatacccacaaggattaatacgtaaaaatggtgaaagatccatattgacgtttaatgccagaccgtggaatgaacaaccgcgtcgaatacgtaaacccagtgagcaaattttcttttccccaacatagacacctggcgcgtcagcccgaggatgcgcttctatacccagttcagccagggtattcaccactgtttgctcaagcaaggtcaccagttcacgcacaccgagtttacggcgtttcaggttaagcaacacatacatcacctgttgccccggcccgtgataagtcacctgcccaccgcgatcgctctggatcaccggaatatcacccggcattaaaatgtgctccgcttttcctgcctgaccttgggtgaataccggatagtgctcgaccagccagatttcatcaagggtactatcatcgcgggtatcggtgaattcatgcatagcctgggagattggctcgtaaggctgaagaccgagctggcggacaagaattttatcctgatacaaaacggcatctccgtggagaatgagtaaaagtgggggaaaagtatatcacagcgaggagaggggagttacccgaccaggagccgggtaacggagaagcgagttacagaaccatgcggacaatatcgattttgcccagttcttcatacagtgtttcaacctgctcgatatgagtggcgttgatagtgatagataccgagtggtagttgcctttgctgcttggttttaccgttggggtgtagtcacctggcgcatggcgctgtaccacttcaaccacctgatcaaccagctcaggtaacgcctgccccataactttgtaagtaaaaggagtagggaattcaagcagttcgttaagtttggttttcatgtcagctccggcgtaacgtaattaaatagcaactcccgccagaaggcgggagttttttactgatgcttagtatatggggacggaaattacactttcaagtgtttaatttttaaccaaaccagtgatggaacattaatttaatgtaatcaatgattttgccgaagaagttaccttccgggatttcttgcaacacaaccagcgggcgttgctcgatcgttttgccatcaagctggaagttgatagttccgacgacctgattcttttgcagcggcgcatgcaattcactgctgttcagcacatagctggctttcagatctttcatgcgaccacgcggaatggtcaggtacacgtctttatcaacccctaacgaagcgcgatcagaatcaccaaaccaaaccggttcagaggcgaactctttacctactttcagtgggttaacggtttcaaagaaacggaagccccaggttagcagttttttactttcggcttcacggcctttaaaagtacgtccgcccattaccgcagaaatcaagcgcatctggccttcagtcgcagaagcaacaaggttgtaacctgctttgtcagtgtgtccggttttgatgccgtcgacattcaggctgttatcccataacaggccgttacggttcagctggcgaataccgttaaacgtaaattctttttctttatagatcgagtattcattcggtacgtcacggatcaatgcctggccgatcagcgccatatctcgcgcggagctgtactgaccatcagcatccagaccatgtaccgtctggaagtgggtatttttcaggcccagtgcgttaacgtagctgttcatcaagccaacaaaagcgtcctggctaccagcggcaaaatcggccatggcgacacaagcatcgttacccgattgcaggttaataccgcggatcagctgagaaaccggaacctgcatgcccggtttgaggaacatcagcgaagaacctttaaacaccgggttaccggtggcccatgcgtcgttgccgatagtgactaaatcagtttctttaaatttaccggctttcattgcctggccgataacgtaactggtcatcattttggtcaggctggcaggatcgcggcggacatctgcgttctgttcggcgagcactttgccggagttatagtcaatcaggatgtaggactccgcatcgatctgcggtacacccgggatcatagttttgatattcaggtcatcggcatgtgcagcagagataaaggctgtgcaaagagccgtggtgagcgccaggcgcttcatgatacgagcggaaaaaatggtattcatggtctgaactacgacatccgtgatggaattaaaaaagtgccctactatagcaaatgcactaccggcaggcatctgactttccgcgtgactttgttaacgtcatttacagaaattgacacatcagatgcctgctttacgctactgcgcggtagtaataaatgactgtaattgggcttcggtttgcaaacgttgctgcaaggtactggcttcggctttgctggcgaatgggccaagctggatccgccagaccgcgccattttgagttacgcgaccggggacgccgaacttctgtcccagttgctgttggtactgttgcgcacgagcctgatcgcttacggccccgacttgcaccataaagttgccgctggcgctttgcgagacggcttgcggtgtcaccattgcaggcgaggttgcaggcgttgtcgacggagctgtaacaacgggctgtggcgcaggcgtcggttcgctgccttccagtacaccaggcgctaaggtcgttggtgcgccgaggaaaccgctactggttaccggcgcgccggtcggatcttcgctttttagcgtcgaattactgaccggaagaatgtcaccctgcgggccagacactgaacttgttcccgcgccaccgcttaaatcgggaggtgcaggcagggcgtaagtctgtttggcgactgtggtacaagccataccaggaccagaaagcgaaccatcctgggcaacaataatcggatcgatacgaactttggtgttgtttgacgtgttaagacggtcagctgccgcgcgagaaagtgaaataacgcggtcgttgccgtaagggccgcgatcattaatgcgcaccacgatcattcgcccgttagccaggttagtgattctggcgtagctggggatcggaagcgttggatgggctgccgtcagctgtgtcggatcgaatgcttcgccagaggccgtcaggttactgccgggttcggcatcatagattgccgccagtcccgcctggctaaatcgagacggatcctgcacgattttgtagcttttaccgtcgcgctggtaatcctgatttgccgtcgcgttcagtggttcgaaacgcgggtccgccccgctaatttcaactatagggccgttacataccgcaggctgcggtacacttaccgtctgttgctgaccatcatcgcttgtacatgccgcgagcattcctgccgcgatgcagatcccgagccactgcttacgcattgcgcacctcttacacgcttttcgacaacattttcctgtgggtgtggattgacattacaatcccgaacccagccatcagcacaattagcgccgatcctccataactgaccagtgggagcggaacccctacaaccggcagaataccgcttaccataccaatatttacgaagacataaacgaataatatcagcattaagccgccagccatgacgcgaccaaaggtggtttgcgctctggcggctatccacagcccgcgcatgatcagcagaatgtagagagcgagcagaatcagaatgcccactaatcccagctcttccgccagtaccgcgaagataaagtcagtatggcgttcggggagaaattcaagctgtgactgagtgccgtgcagccagcctttgccgcgtaatccgccggagccaatagcaattttagactgaataatgtgatagcccgcgccgagtgggtctgattccgggtccaggagcatcattacgcgctggcgctggtaatcatgcatcaggaagaaccacagaatcggaatgaacgccgctaccagcactactgcgacgccaatcagacgccagctaaggccagagaggaacagtacaaacagaccggaaagcgcaacgaggattgatgttcccaggtcaggctgtgcagccaccagcagcgtgggcataaatatcagcaccagcgcgatgccagtgttcttcaacgatggcgggcaaacgtcgcggttgataaagcgcgcaaccatcagtggtacggctattttggcaatttccgacggctgaaaacgaacaataccgaggtccagccagcgttgagcacctttagagatggcaccgaaagcatctaccgccaccagcaaaataatacagatgatatagagatagggggcccagccttcataaacgcgtggaggaatttgcgccatcaccaccatgatgaccagacccatcgcgatttggccgattttacgctccatcatgccaatatcctgaccgctggcgctccagataaccagggcgctgtaaaccagcaatgccagtaagatcagcagcattgtgggatcgagatggactttatcccagaatgtttttttattcggattatccgtcatgattaatggtcctccgctgcggcaaccgctggattttccgcaggcagatcggtgttgttatcacccagcataatgtggtcgaggatctggcgcatcagtgtaccaaccgccggacccgcaccaccgttctccagaatcatggcgacagccacttgcggattgttgtatggcgcaaaggcggtcatcagtttgtggtcacgtaaacgctcggcaattttgtgcgcattataggtttcgttcgctttcagaccgaagacctgagcggtaccggatttcgccgcaattttgtacggtgcgctagcaaagtatttatgcgccgtaccgttagggcggttagcaacaccgtacataccgtctttcgccagctcccagtaaccggaatgaatatcgccgacgggcggttcatgcggctgtacccatggcacctgtttgccgtcttcggcggtgctcatcagcaaatgaggaaccttcacgataccgtcattaatcaggatcatcagtgccttactcatctggattggggtcgctgtccagtaaccctgaccgataccaaccggaatggtgtcaccctgataccacggttttttaaagcgtttctgtttccattcgcgggtaggcatgttgccggaacgttcttccgccaggtcgataccggtgtaatgaccataaccgaatttacccatccattcggagaggcgatcgatccccatatcgtaggccacctgatagaagaaggtatccgcagattcttccagcgatcttgtgacattcagacgcccgtggccccattttttccagtcacgataacgtttttccgaacctggcagttgccaccagcctgggtcaaacagcgtcgtattgcgcgtgatcaccccggcgctcaatgccgaaaccgccacatagggtttaactgtagacgcgggaggataaaccccctgtgtggcgcggttcaccagcggtgtattcggatcgttcaacaaggcggaataatctttgctggagataccgtcaacaaacaagtttgggtcataactaggcgtggaaaccagcgccagcaccccacctgtacgcggatcggtgactaccacagctgcgcggctacccgccagcagcgtttcaatatattgctggagtttgagatccagcgtcaggtaaatatcgtgtccggcttgcggtggtacttcttttaactggcgaataacacgcccacggttgttaacttcaacctcttcataaccggtctgaccgtgcagcacatcttcatagtaacgctcaatgcccagcttaccgatatcatgcgttgccgcatagttggccagtttgccgtcattattcaggcgttcgacgtctttatcgttgattttcgacacatagccgatgacgtgggtcaacgccgaaccgtaaggatagtaacgacgtttatagcctttaacttcgacacccggaaaacggtactgattgacggcaaagcgagctacttgtacttcggtcaggttagttttcaccggaatagaggtgaaacggtgtgaacgtgcgcgctcttttcggaatgcagcaatatcgtcatcggtcagatctaccacgctgcgcaaagcgtccagcgtttgctgcacgttatcgactttctccggcatcatttctatctggtagatagtgcggttgagggccagagggataccgttacgatcgtagataatgccgcggctgggcgcgataggcaccagcttaatgcggttttcattagagcgggtctggtagtcggtaaagcgaacaatttgcagattatacaggttggcgataagcacgccggtcagcagcaaaatccccaaaaaggcgaccagcgcccggcgcacaaacagcgcggactctgccgtatagtcgcgaaaagagttctgtagtttcatccgctgcgttttctactcaaagctcccttatcactcacggtgataaggatggttggtggtgatgctccacgcccggtacagactctctgcgaccagcacgcgaaccagcggatgggggagggtaagcgccgacagcgaccagctctgctcagccgccgctttacaggcaggcgacaacccttcaggcccgccaatcagtagactgacgtcgcgaccatccagcttccagcgttccagctcagcggctaactgcggcgtatcccagggcttgcctggaatatcgagggtgacaatgcggtttttgcctgcggccgccaacatctgctcaccctctttgtcgagtatgcgcttgatgtccgcattcttgccgcgttttccggccggaatttcaatcagctcgaagggcatatctttcggaaaacgacgcaggtactcggtaaaaccggtttgtacccagtccggcattttcgttcccacggcgacaagttgcagcttcacgcattaactccagagtttttccagttcatacaggcgacggctctcttcctgcatgacatggacaatcacatcgcccaaatccacgacaatccagtcggcgctgttttcaccttctacgccgagcggtaacaggcccgctgcgcgagactcctgcacaacgtggtcagcaatggacataacatgacggctggacgtacccgtacagatgatcatgcagtcggtgatgctggatttgccctgaacgtctaaggcgatgatgtcctgacctttgaggtcatcaattttgtcgataacaaaatcctggagtgctttaccctgcaagttttccccctgggtgaatcaaatagataaaaatggtctgtcagtatacctgaaccagaggcgatttcgggacaattgtcgccgaatcggctttcgaaagtgggctatcatcccaccccgcgccgcagattgcatcgccatttttgtaaaacaatttctacaaagtcgtgtctggcggaaaaagtctggctgcggagaatatcagcctgcccgggtctgtcaatggtcgttgcggcttacccgtaaaaaaacagaaaagtcatgcattctcgaccccgatggcacggctattgaggacgcgtagcgtcgcgaatttttggttgatatcaatggcgctccaacacccctggtcaacgcgaaaatgccacatagcttcggcaggcatgccaattaaacgggcgattaacagactcagtacaccctgatggctgacgactaaaatattctgatagtgctgaaattcactaagccttgcgataaagcgttccacacgttgcgaaaatgcctgaaatccttcaccgttcgtggggattgcatgctgccagtcattgcaccacgcgctatagttttcggcatcttcttgcatgaggtcgcgatgatgtcgcatctcccagtcgccaaaaaacatttcgttgagttcaggtatgatttgcacggggagctggcggtcactgagaaccagtcgcgcggtatgctgtgcccgttccagttcactgcataaaaccagatcaaaggaaacaccatgtagcagcgtatgcagattttgcgcttgctcaataccgcgcgcggtcaggggggtgggcgcatgaccgctgtaaagaccatcgatattcgcttgcgtttcaccatgacgaattaaccacagtcgcatcatgccctccgtaacgacaggtatcagcgatacaagccttgttggttaatgtaagtcagtaccggttccggcaataaatcctcacatgattcaccgttttgcaaacgttcgcggatgatggtcgccgagatgttaaaccacggcgtttcagccagataaattttaccggcaggctgaaggtgaagatcttccgggttatgtgtcaaatgatcttccagccattgctggtattgcggttgcgccatttcaagtgggtaacctggacgccgacagacgatcaaatgtgcattgtcgagtatcgtttcgtattcgtaccaggtcggaaaggtcagcagtgaatcctgaccaataataaacgccagcggcacgtccggtccttgttcctgccgccactctttcagtgtttgcgcagtgtaagagggggcattgcgctttagctcgcgttcatcaagagtaaataatggcttgtcggcaatcgccagttcaagcatgtgtttacgctgcacgctgttcgcttccggctggggacgatgcggaggaacattattagggatgattgtgacccgcgtcagaccaatcaaattcgccagcgtttccacgggttttagatgaccatagtgcaccggatcaaaggtgccgccaaacagagcctgtaaagatttcatatcaaccgtcgataaatacgtccgccaggggtttatggcacaacagaagagataacccttccagctctgcccacactgactgaccgtaatcttgtttgagggtgagttccgttcgtgtcaggagttgcacggcctgacgtaactgcgtctgacttaagcgatttaacgcctcgcccatcatgccccggcggttctgccatacccgatgcttatcaaacaacgcacgcagtggcgtatgggcagactggcgtttcaggttaaccagtaacaacagttcacgttgtaatgtgcgcaacaaaataaccggttcgctgccttccagacgcagttgctgaagaatatgcaatgcgcgcttactttttcccatcaacaaagcatcaacccaatgaaaaggggtgaaatgcgcggcatcattcaccgcctgttcaacgcgcggtaatgtcaatttgccgtctggccagagcagcgataaacgctccagtgcctgagccagcgccagcaggttaccttcataacagtagcagagcacctgatttgccgcgtcatccagttctaagttgagctgttttgcgcgcgcagcaacccagcggggaagctgagcctgctccggtgtctgacaggtcacctgcacgctgcgattcgcaagcgcagtaaaccaggcggcattttcttgcgctttgcttaatttattaccgcggacgatcaacagcaggtcgtcatgcagaagtccggtgagtgtgagaagttgctcattgatcgccgcattcggtccgttttctggtaacaacagcaatagcgtttgtcgactggcaaacagactcatagcctggcataacgaaaagatcgcattccagtcagtgttgggatcaatggaaaaagtgtggtgttcttcgaatccttgtgccgcagctacctgacgaacagcgtcctggctttcctgcaataacagaggatcgttaccaagtaaaagatacgccgcgcgcagcccttcattgagctgcgcgcggagttgttccgggtacaaccgaatcatcagttacccagcgtggtggagacgcgtgcaggcgttgccggagtatccgttgtggtcgacgtctgttcttcgtcggaacgaatatccgcagcacggatgcttggcagcttacgaatcagctgttcggcagcacggtcgtacatctcttttacgatcatgtcttgttcgttatctttcgctaacgccatttgcgggttatcgaagaacgaacggaagactttggcgctaatcgggtagatatcacggccggggatcaacacggtcgcattaaccgtcatgatcatctgatactctgctgtttgaccgttacggaataccgatgcggtatctttcgcgatgctcactttacccaaacgcaaggatggaacgtccttacgcgtggtttctttatcaagcaactcgacaccattcagacgtaactggttacgcaccgcacggcttaatggcccgttcggatcgcctgagtccaggatcatgaccttcatagtggaaggaacctgcgtggtatcacgcagatgccagccacacccggcggtgattaacaccgccagagataacaacaatgttgccagatatcgcacgcttcctcccgcgcttagccaacgaccagattgaggagtttacctggtacgtaaatcactttacgtacagtaacgccatcaagatattttgctaccagatgttcctggccagcacgttcgcgaacctgttcttccgttgcgtccaccggaacggtgattttggcacggactttaccgttaacctgcaccacgaccagcgtggagtcttccaccatcgctttttcgtcagcaaccggccacggcgcgttgtcgatatcgccttcgcctttcagttcctgccacagcgtgaagcagatgtgcggggtgaacgggttaagcatacggacaacggccagcagtgcttcctgcatcagagcgcgatcctgctcgccatcggttggtgctttcgccagtttgttcatcagctccataatcgccgcaattgcggtgttgaaggtctgacgacggccgatatcatcggtcactttagcgatcgttttatgcacatcgcgacgcagcgctttctgattttcagtcagcgcatcaacgttcagtgccgcaacatcaccttttgctgtgtgctcgtaaaccagtttccagacacgtttcaggaagcggttagccccttccacaccggattcctgccattcgagagtcatatcagccggagaagcaaacatcataaacagacgaacggtgtccgcgccgtaacgttcaaccatcacctgcgggtcgataccgttgttcttcgacttggacattttgctcatgccggtataaaccagttcatggcctgccgcatctttcgctttcacgatacggcctttctcgtcacgttcaacgatagcatcaaccggggaaacccagttacgttcgccgttttcgccaacatagtagaaggcatctgccagcaccataccctgacacagcaactgtttcgctggttcgtcagagttcaccatgcctgcatcacgcatcagtttgtggaagaagcggaagtagagcaggtgcataatggcgtgttcaataccaccaatgtagatatccaccggcagccagtagttagccgcttcggaatccagcataccttctttgtactgcgggcaagtgtagcgcgcatagtaccaggaggactccataaaggtgtcgaaagtgtcggtttcacgcagtgctggcataccgttaacggtagttttcgcccactccggatctgctttaatcgggctggtaatgccgtccattaccacatcttccggcaggatcaccggcagctggtcgtccggggtcggcattacggtaccgtcttccagcgtcaccatcggaatcggcgcgccccagtaacgctgacgggaaacaccccagtcgcgcaggcggtagttcactttacgctcgccaacgcccatcgcagtcagtttatcggcgatggcgttgaaggccgcttcatggtcaagaccgttgaactcgccagagttgaacagcacgcctttttcagtcagggcttgctgagaaagatctggctcagagccgtcagctgccaggataaccggtttgatgttcaggccgtatttagaggcaaactcgtagtcgcgctggtcgtgccccggtaccgccataactgcgcccgtgccgtactccatcaatacgaagtttgctgcccaaacgggaatttcttcgcccgttaatgggtgaaccgctttaaagccagtatcgacgccttttttctccatcgtcgccatttcagcttcggcaactttggtgttacggcattcgtcaataaaggccgccagttcaggattattttccgccgctttctgcgccagcggatgacccgcagctaccgccaggtaggtacaacccataaaggtgtccgggcgggtagtgtaaacggtcagcgtgttgtcatagtcgttaacgttgaaggtgatctccacgccttcggaacgaccgatccagttacgctgcatggttttaacggtgtctggccagtgatccagtttatccagatcgttgagcagctcgtcagcgtaagcagtgattttgataaaccactgcgggatctctttacgttcaactttggtatcgcagcgccagcagcagccgtcgataacttgttcgttcgccagtacggtctggtcgttcgggcaccagttgaccgcagaagtcttcttatataccaggccttttttatacagctcggtgaagaatttctgttcccaacggtagtattccggcgtacaggttgccagctcgcggctccagtcataaccaaagcccagcattttgagctggtttttcatatacgcgatgttgtcgtacgtccacggtgccggagcggtgttgtttttcaccgccgcgccttccgcaggcagaccaaacgcgtcccagccgatcggctgcaggacgtttttgcccagcatacgctggtagcgggcgatcacgtcaccgatggtgtagttacgtacgtggcccatgtgtagtcgaccagaaggatagggaagcatagacaggcagtaatacttctctttgctctcgtcttcggttacttcaaatgtgcgcttctcatcccaatgaagctgtactttggattctatctcttccgggcggtattgctcttgcatggcagccagtggtcctgttttcaatacggctacaaatgtagcgttgaggtggtttttcagatccgcatagcatagcccaaacgtccgcgtcaaaacagcctttcgcgcactcgacgttgaaatgatgcccggattattcatacattaatttacagagtttgtgggcgtattagcaaagcaaggaacaaagaacgtctattattatagtcagttaacgacccgggagatgaaacgatgaacaaggttgctcaatattaccgtgaactggttgcgtcactgagcgaacgcctgcgcaatggcgaacgtgatatcgacgcactggtggaacaggcgcgcgagcgcgtaataaaaacaggggagttaacgcgaaccgaggtcgatgagctgacgcgagctgtcagacgtgacctggaagagttcgccatgagctatgaagagagcctgaaagaagaatctgacagcgtctttatgcgggtgattaaagaaagcttgtggcaggagctggcagacatcaccgataaaacgcagcttgaatggcgcgaagttttccaggacctcaatcatcatggggtttatcacagcggagaagtggtcgggctgggaaatctggtctgcgagaaatgtcacttccatctcccgatctacacaccggaagtgctgacgctatgcccgaaatgtggtcatgaccagttccagagacgcccgtttgagccgtaatagtctgatttcgcacagcaataaagagaatatgggccgaatgaaattccccggcccttgtttttatctctacagtaaatcttcagtctcacgaatttcctgactgacatctctggttccggatgactgaactttacgatacaggtcgagagcctgtcggagatcgacaggtcttccttctccgtagtgatacataatggccaggttataccaggcagtggcgtcattgcattcagcggctttcgtaaaccattcaaaggcagcctgataatctttctcaacgccttgtccgtgtttatacatataaccgatgttgacgtaagcgccgacgctcccctgagcggcagccttcagataccagtacatcgcttgcttatagtcctggtccaccccttcgccagcgttataatcccatgcaatttgaaactgggcgtgccgattaccctgctgtgcgcttttcaaataccagaatgcggcgagtgtcttgttttgagcaacgccttttccgtcttcataaagatcggccagattgttttgcgcgtcactatggccttgtaatgcagcttgtttgtaccagaaaaatgccagcgcatagtcttttgcgactccgttgccatttctgtacatccacccaagattattttgcgcataagacattccgctctccgcggctatctgataccagacaaccgcttctttataattgggggcttctccacgatccagtgtccagccaagggcgttggaagcgaaagtatggccttgtagggcagcttttttcagccagaagatggcttgctcattatctttatgacggcttttatcctcggtatacttttgccctaaggaatactgtgcttcacaatgaccttgctcagcggccagcttcagccagtaaaaggctttttcgtcgtccggagaatcaattgcgctatcgcgattataataaaacccaacaatatattgagcctcgcaatcgcctttttcagcacgttcgataatctcatctattgataaattatcgcagcaacttgacgtgaaaatcattatcatttccttatggttgcagataaaacatattatatttttatgtgttccatttttgcgtaagccttattttatgcgtattatgtcgcgtcagaaaagtataaataaacgagcctcgcaatgcggctaatattcatttaatgaatatttaaggataaattatatggacatggagtcgcaaaaaatattgtttgcactttccactccgatggaaatacgcaatgaatgctgtttaccttcgcattcatcacccaaaatgtatttaggtacatgcttttttgacctttcttcctcatggggaattgatgaccgtgatgacctgctgcgcacaattcaccgaatgatcgataacggtcatgccgctcggttggcagggttttatcaccgctggtttcgttattcgccatgtgaatggcgtgactatcttgctgaactaaatgagcaaggtcaggcttatgcgcaatttgtcgccagcaccgccgaatgctgtggcgaagggggaatcaaagcctgggattatgtccggatgggttttttaagccgaatgggcgtacttaataactggttgagcgaagaagaaagtctatggatccagtcgcgcattcatctacgggctctacgttattatagtaactggcggcaatactttgccggttatacctttggtcggcaatattggcagtctcccgaagatgatcatctgcctttattacgcgaattcttagcgcgtaaagaatacgacgattccggcaatgatatgttttatcaattatttgccagtgatgatgcgtattaccctaccttgtcctggcaaccattggcttactattctgcatgcccggaaacgcttaaggatatgagcgacctatgaaaaattgctggaagatcctcgatatagaggaaacgactgacgtcgatattatccgccgcgcttatctggcgctgttaccgtcctttcatccagaaaccgatccgcagggttttaaacaacttcgtcaggcgtatgaggaggcgctacggattgcgcagtcgcctgctaaatctgtttggcaaccagaagaatatgaggtagcagaacatgaaattctgctcgcctttcgtgcgttacttgcctctgatagtgaacgttttctgccctccgcctggcagcgattcattcagcaattaaattattgctcgatggaggagattgatgaattacgctggtcgctgtgcacaatcgccatgaacactgcccatttatccttcgagtgcgtggtgttattagcagaaagattgcggtggttacaggaggaaaataccggggaaatagacgaagaagaactggaatcctttttatatgccattgcgaaggggaatgtttttaacttccagaccattctgcatctgcccgttgccgtgcaaaatgacaccatcgatttttaccaaatgttcgctcggatttggtcatcgcatccacaatggctgacattgtatttagcgcaacatcgcgcagtgattatccccgatgatgcaaaactgcacagaaatttactccgctggtatagcgcaggtcgcctggatatccccgaacttctggattacgcccagtcatggcgggaaactgaacctgataatgaagatgcgccttattatgaatacgcgcaacgcgtctattgtggagaaggcgaaagcctgttggcagaactttgtgactactggcgcgagtatccctccacccaggcggatgctttaatgttgcaatggtgccgtcagcatcgggtcgattattacccattactggtgatgatgattgaagcgcgtgatctggttaacgatcagggaaaaccgctactttatgtccccggcgacagcgcccgtacgcgttttcatttatacgaaatactcagcgatgaaaaactctctgcgctggggcgttcactggtcgagatggttttgcacaaaggacgtaagccgcggatctcactcacgcgtgatacagaacataccttatggccattatatctagttgccaaacaattagtgcaggcctgccaacctacagaagaatcattaatgccgattgtgagccgccttgatgcagaaaatcgttgtccactggaagcattaattattcgtcgattattaattcaggcggcgaattttaccgagaagcaaactgttgaaccggagccgcaaccgcagccaatgcccgttgacgatggtgggccaggctgtctgggcatcattaaaattattttctatatttttatctttgctggtttgatagggaaaatactccatctgttcgggtgacagtcgacgttaatgtgcgggaagcccggcaagtaatctttccgcatttttgtaatgttgtttggcggtcagttttaaccatttttgagattcataatggttaacattaatacctgagccatttctgtagatcaaacctaaagtatattgagcatgagcatacccttgttcagctgcttccttataccagagaattgctttacgggtgtcgggtttgacccccagacctttgaggtagatccaccccagtttactttgcgcgcgtggattttcctgttccgctgattgctcataccagtatctcgcctgtgtataatccagtggtttaccgtcgctaccatgaagataaaattctccaaggcgatattgcgacgttgagtgaccatgaatcgcggaaagctccgtggctgccgtggtgaatggaagactgcccggtgagcttaaataatcaaaggcataattcaccatggctttatcacgcaacgtcgttttcttgggttggctaatacaggtaattgctgcaactataaaaattgcgaatatatacattaattttttattcatgtgtgaatgcttcgattttctttttattttgaaagcgtcaagtttatactcatcaataataaaaaagtagtcagttaatgcacttaagggattattaacaaatgaataaggaagaacaatatcttctttttgcgctttctgcgcccatggaaatacttaatcagggttgcaaacccgcgcatgactcgccaaaaatgtatactgggataaaagaattcgagctctcatcatcctggggaataaataatcgtgatgatttaattcagactatttatcagatgactgatgatggtcatgccaatgatttagctggcttatatctgacatggcatcgctcttcccctgaagagtggaaagcattaattgctggtggctcggagagagggttgatttatacccaattcgttgcccaaaccgctatgtgctgtggggaagggggaatcaaagcctgggattatgttcgaatggggtttctgtcacgggtcggtgtgctcaacaagtggctgacggaagaagagagtttatggctgcaatcgcgcgtctatgtacgagctcaccattactatcacagctggatgcactatttttccgcctattcgttaggacgtctctactggcaatcttctcagtgcgaagacaacacttcgctacgcgaggcgctaaccctgtacaaatacgatagcgccgggagtcgtatgttcgaagagctggcagcgggaagcgatcgtttctatgccacgcttccctggcagccattaactgtccagtctgaatgcccggtaacgcttaaggatgtgagcgacctatgaaaacatgttggcaaatcctcgaaattgaaagcacgacgcaaatagacattatccgccaggcttatcttgctcgcttaccgttgtgtcatcccgaaaccgatccgcaagggtttaaagcattacgccaggcctatgaagaggccctgcgactggcggtaaatcctgtcgaggaagcagatgatgaagaaaaagatgctgccgctgaacatgaaatactacgtgcattcaggacattactggattcagaaagtgatcgttttcagccttccgcctggcagaaatttattcagcaattaaatacctggaacatggaggatgtcgatcaattacgctggccgctgtgtgcaatcgccatagaagcgcgatatctttcattaaattgtgcttctttgctggcagagcgtttgaactggcattcatttaatgacagcgaaggaatggatgaggaagaaagggaggcttttcttgaggccattcaggctggtgattgtttcgatttccttagccttctggaatatcccattgcgttgcagaaccagactgttgagtattacttcgcgctggaacgttgctgccgttaccatcctgactatgtcactgcgtttttggcgatggaaggtccgtggttaattcctgatgatgcaaagttacatcgcaaactgttgcgctggtacagctcggtgcaaacaggtatggcggaactcattcctgtcgctcaacagtggcaaacggaagaaccagaaagcgaagatgcccggtattacttgtgtgcacaacgtttgtactgcggcgagggggaaagcctgcttgccgatctctgcgcgtactgggaaagttacccatctacacaagctgataatttgttgttgcagtggagcaagcgtcattgcccggattatttcgcgttattagtgatggttatcgaagcgcggagcatggtagatgcgcaaggtcaaccgctgaaatatgttcctggtgagagcgcccggacgcggctgttatgggcggagattttacatagcggaaaattatcgccgttaggtcaatcgtttattgagtcgttattcttcaagcgcaaagcatgggcgtggtggaaatcgagagtcggtagcgagacagagcaagattcaccgttcctggatttgtatcgggtagcggaacaggtagtacttgaagcgtttccgaaacaagagatgctggcccgtcttaatacaaggctggaaggcggagatgctcatccattagaggccattgtcacccggatgcttttgacgaaagtgaaactcgagccggaggatgaagatgtcgatgagccaacacctgaaaatcatgaagaaaaaaatgatgagggtgaaaaaccacagagcattaccagcattatcaaaatcagtttaacggtgctggtgataggttatgctctcggcaaaatcgcgatgttgtttagctgacgatgtgttttttgcgccgatgccggatgcagcgtttacgccgcatccggcagccgtgtttatgggatctcaatggctaaataatcgctcgcccgccgccgaacttcatccacgcgggccatatcgtttgactgcaacgccgcatcaaaatcggtgatcacccggccgatctcttctcgctcgtcacccagcgcccgcgcccacaactcttccagtttggctttaaaggtgcgattgatgagcatatcgcgcggataaattttcaatgcggataaccgcgtccgactctcttcaatctgctgcgcgctcaatgttaccgggctgtggttaatcactctggacttaacgctgccgtcttccagaagcacgtcaacttcaagcaacccgttgatatcataactaaagcgaatatcaatcgactgataagccccggttttcttcaacggcacatcgaaggattccaccagaatgttgtttttaactttgtggttttctccctgatagacgttaaccgtaattgaatcctgttccgggtgcatggttgaataagtttctacacgcgacacgggcacagtggtgtttcgttcaataatcggcgagaaaatgccggaaacgccctggcggttaacttcaacgcccaacgagtaagggcaaatatcagtgaggattacctcttcaatatcttcactgcgtaagcggcaggcggcctggattgctgcgcccagcgcgacaatggtgctcggatcgtaactttgatacggtaatttgccaaacagacgcacggcgattcgctgcaccagcggcatttgtgacgcgccgccaaccagcaccagactgtcgatttgactcggcttcagacgcgcatcgcgcaacgcctgttcaatcggcactcgcaagcgattgagcagcggcaaccacaaatcttccagttcgttctcgtaaaattcgcattcccgcgtttcttcctgatactgccagcgaatgtgcaatggcgattgattgctacattttgccgcttccacacaggcgtacaaggctgccagttcactctcgttaagcgtggtcctggcgacatccgcgcgttttaaaacctcatcgaccagcatatgggtaaaatcttcgccaccaagaaagttgtcgccagcggaggcgtgaacttcaatcaccggcgtggcgtactcaagcaccgtaacgtcaaacgtgccgccaccgagatcaaacaccagcgaacgggtattttgttgggtatgcaggccatacgccatcgcagctgctgtgggttcattaattaagcgtaccgcatttaacccggctaactccgctgctaaacgggtatgcttgcgttgttcatcgctgaaataagccggaacggagatcaccacatctttaatcggacgttgcagaaattcttcggcatcttcttttaatgagcgtaataccaaagaggacagttctggcgcgttaaatgtgtcgctgcctaaccgccagttggtattactgcccattgcacgtttaaataacgctgccgttttatccggatgcgaagtacgccgtgatacagccggttttccgactaaaatatgattattttcatccatgctaattatggatggtgttaaatattcaccgaacttatttggaattaattgcgcggcaccgtctttccagacggcaattaaactattggtagtaccgagatcgataccaatggcgagttctgcattatccattgcatttatatcttgaaagaaaaagagataaacagattaagaccacccaggtaacgcgtggtgatcttaatcaatgacgtgtgttaagcgtaaaatttcagacgatcagccagtaaatcaacaaagccctgacgatcaacatcgaccattacggtggcattcggtttattgcctgtcagataataataatcaacaaccgtcataccctgggtatatttcccctgtgtttccacgccaacccagcgctcaacagaggtaaataactccggtttcaacagccaggcgatggtgcatgggtcatgcagtggtgcgccgacaaagccccatttttcgtctttatgatattcgaggaagaaatccagcagttcggcaacaatggttgaaacagggttaccaatcgcgcggaaacgctcggtgtcttcaacgtggatttgtgctttatgagtaacatccagaccggccatcaccaccgggatccctgactggaagacaatttctgccgcttccgggtcaacgtaaatattaaattcagccgcaggcgtccagttacccagccccatagcgccacccataatcacgatacgggcaattttgctatgcagttccggatggctattgagcagcaaggcaacgttagtttgcggtccggtagacacaatggtgacaggttccgcactttcacgcagcgttttcgccatcagctctaccgccgtacagttttgcggtgcgaatgtcggttccggtaatgccgggccgtcgagaccgctttcgccgtgcacattgtccgcgataatcaactcacgcattaacggttttaccgcgccgcctgctaccggaatatcggtgcgattaagcaaggtcagcatacgcagaacattgcgtaaggttttttctggtgtctggtttccggcggaagacgtaattgctttgacatcaagctctggtgaggcgagggcgagaactattgcgatagcgtcgtcatgacctgggtcgcaatctaacagaattggcagtgccattgttgctccttgttgtgtgcttctttgcgacaagggtaacgccaggatgtaacagatacgaggggcgaaacgataaagcgtgagatggcgcgcaattgggtatgcgcgccagagtgattaatgcaggattttcgcgaggaagtcttttgcgcggtccgatttcggatcatcgaagaaagcgtctttcggcgagtcttcgacaattttaccctcgtccataaagatcacccgattcgccactttacgggcaaagcccatttcgtgggtcaccaccatcatggtcattccttcgttcgccagttccaccatcacgtccagtacttcgttgatcatctccggatccagcgccgatgtcggttcgtcaaacagcatcgcaataggatccatacacaacgcgcgagcgattgccacacgctgctgctgaccgccggaaagctgcgccggaaacttattggcgtgagcagaaagcccgacacgctccagcagtttcagggctttttcacgagccggcgctttatcgcgtttaagcactttcacctgcgccagggtcaggttttcgataatcgacagatgagggaacagctcgaaatgctggaataccatcccgacgcgggaacgcagctttgccagatcggttttcttgtcgttaaccacgataccatcgacggtgatttcaccttgctgcaccggttcgaggccgttgacggttttaatcagcgttgatttgccggaaccagacgggccgcaaaccaccaccacttcgccttttttcacttcggttgagcagtcggtcagcacctgaaagtgaccataccattttgaaacatttttcagggtaatcattatgctgtccttcttttcaagtagctgaccaacaacgacgcgctaagactaataacgaaataaacaaatccggcaaacaggatcatctcaacctgcgtaccatcacgctcaccaatggttgaggcggtacggaagaaatcggccagggataacacatacaccagtgaggtatcctggaacagtacgatgccctgagtgagcagcagcggcaccatcgcgcggaacgcctgcggcagaataatcagtttcatcgactgccagtgagtcattcccaacgccagcgcggcgctcgattgaccacgagaaatactttgaataccagcacggataatctctgaatagtaggccgcttcaaacatcgaaaacgccaccatcgccgaaattaaacggatatcattttttggcgataatcccagcacgttttgcagaaaacccggcacgatcaggtaaaaccacagcaaaaccataactaaaggaatcgagcggaatacgttaacgtaggctttggcaaaccacgccacgggcgcaaagctggataaacgcatcaccgccagcatcgtgccccacaaaataccaatcactaccgccgtgacggtgattttcagggtgatcaccagcccgtcgagcagatatggcagggaagggacaatggaactccagtcaaactcgtacattatttgccccccatgttgccaggcaggcgaactttacgttcaaccagcgtcatcaccagcatgataaaagcgttaatcaacacatacgccagcgtaatggcggtaaacgactcccaggcatgggctgagtaatcgagcaatttacccgcctgcgccgccatatccaccagaccgatagtcgaggcgatggcggagtttttcaccaggttcatcatctctgaggtcatcggcgggacgataacgcgataagcattaggcagcagtacgtatcgataagcctgcggtagcgtcaggcccatcgccagcgcggcatttttttgccctcgcggcagcgactgaatcgcggcgcgtacctgttcgcaaacacgggcggcggtaaacagccccaggcagagcatggatgaaaggaaaaactgaatattgggatccagctcggccttaaaccacatgccgattttctccggcagcagctccgggatcaccagataccaggtaaagaattgcacaatcaacggcacgttgcggaacagttcgacatacaacgtacccagaccagagagaaaacggtttggaacggtacgtaaaatgccgaaaaatgaaccgacgaggaaagcgataatccaggcgcagatcgacaaagcgatcgtcacctgaaaaccactccagatccaaccaagataggtggtgttgccgaacggggcttgttgtaaaaaaataccccagttccagtctatagacataaatctactccagaaaaaagagggtagcagcgttaactgctaccctcgaagattgttacccagcgtattgcggttttcaggcccgatggggaacgaccatcaggcgtatagtctgtccgtgctacgtaacaatcgagagggctggaatttccgcccctggttcttgtaattagttcagtgccttgtcattcggttctttgaacagtgctttcatttcgtctgacagttcgaaattcatgttcaggtttttcggcggaattggatttttgaaccacttatcaaaccatttttccgcttcaccggaggtctgcacctgagcgatggtgtcatccatcagctttttgaactgcggatcatctttacgcaacatacaaccgtaggcctcctgagactgcggcttgccgacgatttcccagttgtctggtttcttcgctttcgcacgttcaccggccagcagagcgtcatccatcataaaggcaacggcacgaccgctttccagggtgcggaaagagtcaccgtgatctttggcgctgatgatgcgcatattcattttttgctcttcattcagtttgttgagcaaaacttcagaggtagtgccggaagtgacgactacggctttgtctttcaggttggcaaaatctttgatatcgccaccctttttggtcaacaggcgcgtaccgaccacgaaaatagtgtcagagaaagccgcctgtttttggcgttcgacgttgttggtggtagaaccacattcaaaatcgaaagtgccgttttgcagcagtggaatacggttttgtgaggtaatcggaatcagttttacctgcaagtccggtttgttgagtttctttttcactgcttcaacaatggcgttggagtaatcctgcgagtaacccaccactttttgctgattgtcgtaataagagaaaggcactgaagattcacggtgaccgacgacaatcacaccgtttttggcgattttgtccagagtactgcccgctgccggggcggcgtcatctgcctgtgccagtcctgcggaaagcgccagggcgaggattgctgtggcaggtttacgtaattgcatatccaactcctttatcttctgcgttaagaacgcatggatacccgttgtgagtgtttgtgttgttatcgtctgcaactttattgtgcagtgttgtgcctgttagggaaggtgcgaataagcggggaaattcttctcggctgactcagtcatttcatttcttcatgtttgagccgattttttctcccgtaaatgccttgaatcagcctatttagaccgtttcttcgccatttaaggcgttatccccagtttttagtgagatctctcccactgacgtatcatttggtccgcccgaaacaggttggccagcgtgaataacatcgccagttggttatcgtttttcagcaaccccttgtatctggctttcacgaagccgaactgtcgcttgatgatgcgaaatgggtgctccaccctggcccggatgctggctttcatgtattcgatgttgatggccgttttgttcttgcgtggatgctgtttcaaggttcttaccttgccggggcgctcggcgatcagccagtccacatccacctcggccagctcctcgcgctgtggcgccccttggtagccggcatcggctgagacaaattgctcctctccatgcagcagattacccagctgattgaggtcatgctcgttggccgcggtggtgaccaggctgtgggtcaggccactcttggcatcgacaccaatgtgggccttcatgccaaagtgccactgattgcctttcttggtctgatgcatctccggatcgcgttgctgctctttgttcttggtcgagctgggtgcctcaatgatggtggcatcgaccaaggtgccttgagtcatcatgacgcctgcttcggccagccagcgattgatggtcttgaacaattggcgggccagttgatgctgctccagcaggtggcggaaattcatgatggtggtgcggtccggcaaggcgctatccagggataaccgggcaaacagacgcatggaggcgatttcgtacagagcatcttccatcgcgccatcgctcaggttgtaccaatgctgcatgcagtgaatgcgtagcatggtttccagcggataaggtcgccggccattaccagccttggggtaaaacggctcgatgacttccaccatgttttgccatggcagaatctgctccatgcgggacaagaaaatctcttttctggtctgacggcgcttactgctgaattcactgtcggcgaaggtaagttgatgactcatgatgaaccctgttctatggctccagatgacaaacatgatctcatatcagggacttgttcgcaccttccttaggtaacatttagtttggctaaatgtaaagatattgctgttttattgtttgtttttgcgagatgcgccgcaccattccgaagcaaaattcttaaaatgcactcttttagtgctaccgctggattactgtggtgcaactaggttgtactgatgctgtttcagggtttgccttgtataacaaagcaatagatgtgccaaagttggataggagaatattgttatccggataatgcactgatgccgcatccggtgagcgtgccgaaatatgggatgtattccggcacgataagaagggattatttacgtcgctgacgcagactcatcaacacagcagcaaaaccaaacaatgccgtcagcacccacagcggccagttgccggtacgtgcgtatggtgtgagtccggtggtcggcgtcacgttagtggttaacacctcgcgggtgaactgcgggatcatcgcctgaatctcaccctgcgggccaatcaccgccgtaatgccgttgttggtgctgcgcaacagtgggcgcgccagctccagcgcacgcattcgcgccatctggaagtgttgccatggaccaatagatttaccaaaccacgcatcgttggagatagtcagcagatagtcggtatccgggcggaagttatcgcgcacttgctcgccgagaatgatctcgtagcaaatagccgcagtaagctcaataccatttgccgacagcggcggctggatatatggcccacggctgaacgacgacatcggcagatcaaagaacggtgctaacggacgcagaatcgactccagcgggacaaactcgccaaacggcaccagatggtttttgttatagcgatcggctgattcgtagctgtacggcgcacctttacccagcgtgatgatggtgttgtaggtatcgtagcggttctgcttattgagacgcgcgtcgacaatcccggttaccagcgagctacctttatcacgcaactcaccgtccagtgctttgaggaacggttgctgattaatttccagatcggttatcgccgactccggccagataatcaacgatgatttgcccatcagcggtgccgttgcgttgtagtaaatcttcagcgtattaagaagctggccttcgtcccatttcagcgattgcggaatatcgccctgaaccatcgaaacctgaatggttttctccggttgtggggtaaaccactggatgtaacgcagcgggaagggaagggcaaacagcacgacggccaccaccagcggacgccagttgcgtttgaccaacgccagtgccagcaggccactaaccatcatcagcaggaagttaatggcttccacgcccattatcggtgccagcccttttaacgggccatcaatctggctatagccgaactgtaaccacgggaagccggtcagtacccaaccgcgcagaaactcggtcacttgccagagggcaggggcggcaatcgctacgcgcagccaggtggttttcggccacagacgcgacagcacgccagcaaacagtccggtatacagcgacaaatacgccgccagcagcaccaccaggaagatgttaaccgggccaggcattccgccaaaggtcgcgatgctgacatagacccagttaataccgctgccaaagaggccaaatccccagcaaaagccaatagcggcagactggagtggacggcggttaaaggtcaacgcctgaagccccatcagcgaaataatcgccgcaggccagacgtcgtaaggagagaaggccagcgttccgcaggcaccgaataataacgccagcagcaggcgaatgcgctggcgttcaattaatgaggcaaaagccatgtagttatctatccagtttcggttttattcatccagcttcggctggggtgagtcatccgggattttgacatgaacctgaataatacgccgactgtcggccatcgccactttgaactggtaaccgtcgatgtcgatagtttcgccacgcgccggaagatgcccaaatgcctgcatcaccagaccaccgatagtgtcgacttcttcatcgctaaagtgggtgccgaacgcttcgttgaagtcttcaatggaagccagtgcgcgtacggtccaggtatgacgactcagctgacggaagtcgatatcatcttcttcgtcatactcgtcttcaatctcaccaacaatcagttccaggatgtcttcaatggtcaccagaccggaaaccccaccgaattcgtcaataacgatcgccatgtggtaacgctgagagcgaaactctttcagcatccggtctacgcgcttactttcaggaacgacaaccgcctgacgtaacactttgtccatgctgaaggcttcagcatcgctgcgcataaacggcagcaagtctttcgccatcagaatcccttcaatgtgatctttgtcttcgctaatcaccgggaaacgtgagtgggcggactcgatgatgacatcaagacattcgtccagcgtctggttgcgtttcagggtaatcatctgggagcgggggatcatgatgtcgcgaacgcgttggtctgcgatgtccatcaccccttcgagcatatcgcgcgtatcttcgtcgataaggtcgttctgcccggaatcacggatcagcgccagcagttcgtcacggtttttcggttcaccgtggaaaagttggctgagtaacagggagaaaaatcccttcttgttgcttatcgtgtcactactgtgtgaattgtcgtcgctcatggcgtcgtatgggttctcatgttagttaatcaaaacgccgtcgttaatcaccaacggcggggacgtctgccagtcaaatgcctggcaaattattctttctcggcaatgtacggatcctcatagcccagagcaagcataatctctgtttcgagggcttccatttcttctgcttcgtcatcttcgatgtgatcgtaacctaacaaatgcagactgccgtgcaccaccatatgcgcccagtgcgcctccagtggtttgccttgctcctgagcttccttctcaaccacctgacggcagataaccagatcgcccagtagcgacatttccatgccaggcggcacttcaaacgggaaggagagcacgttggtcggcttatccttaccgcgataggtcagattcagactgtggctttcggcggtatcgaccacgcgaatcgtcacttccgattcttcctgaaactgcgggatcaccgcattcagccatgtctgaaactggctctcttccggtaacccggaattatcttcacatgccagttgtaaatcgaggatcacctgactcatttttgttcctgttcttcgcgcttgcgttctgctgccagcgccgcttttcgtttttgttcggcttcttcccaggcttcataggcgttaacgatacgcgccaccacagggtgacgaaccacgtcttcgctgtggaagaagttaaagctgatctcttcgacatcggccagcacttcgatggcgtgacgtaagcctgatttagtattacgcggcaggtcgatctgtgtgacgtcgccggtgataaccgcttttgagttaaaaccgatacgggtcaggaacatcttcatctgttcgatggtggtgttctggctctcatcgagaatgataaacgcgtcgttcagcgtacgaccacgcatataggccagcggtgcgacttcaataacgttgcgctcaatcagtttctcgactttctcaaagcccagcatttcaaacagcgcgtcgtacagcgggcgcagatacgggtctactttctggcttaaatcgccaggcaggaagcccagtttctcaccggcttctactgccggacgagtcagcagaatacggcgaatttcctgacgctccagggcatcaactgccgcagccactgccaggtaggttttacccgtacccgccgggccaacgccgaaggtaatgtcatggtcgagaatattggcgatgtactgcgcctggtttggcgtgcgcggcttaattacgccgcgtttggttttgatattgaccgctttgccgtactccggcacgctctccgcgctttgctccagtacccgcgcttctttaatcgcaaggtggatctgttccggttcgatatcctgaatctgaccgcgcatcggggcagtatcgacatacaggctacgcagaatgtctgccgcagcggtgacgcaaatcggacggccggtcagtttaaagtggttatcgcggcgattgatctcgatgccgagacggcgttcgagctgcttgatgttgtcatcaaacgggccgcacaggctcaacagacgcgcattgtctgctggctccagggtgatttcgcgagtgtctatgttcaaaccgttcctcttatctgtatgccgccggaagctgaacattcaccggcctataaggaaattattcacgccacaggaaaaaggcgcaagcattgcaataaagatggggataaagagagaaaaaacaaggcccaccggaacggcaggcctgagaattacggctgataataacccacgccaaggtcgttttctttgcgggtacgggcaatcactgattccggtgtttctgccacgcgcagacccatttcatcttcagtacgcaccactttaccgcgcagagagttcgggtagacgtcggtaatttctacatcgacgaatttaccgatcatatccggcgtgccttcgaagttgaccacgcggttattttccgtacgcccggaaagctccatgatgctcttacgcgatgtaccttctaccagaatacgctgggtggtgccgagcatccggcggctccacgccatcgcttgctgattaatgcgctcttgcagaatatacagacgctgcttcttctcttcttccggaacatcatcaaccatatcggcggctggtgtacccggacgtgcagagaagataaagctgtagctcatgtcgaaattgacgtcggcaatcagcttcatcgttttctcgaagtcttcggtggtttcgccagggaagccaacgatgaaatcagaactgatctgaatatctggacgcgccgcacgcagtttacggatgatcgctttgtactccagcgccgtatgggtacggcccatcaggttcagaatgcgatcggaaccgctctgtaccggcagatgcaggaagctcaccagctccggcgtgtcgcgatacacttcgatgatatcgtcggtgaattcgatcggatggctggtggtaaagcgaatacgatcgatcccgtcgatcgcagcaaccagacgcagcagatcggcaaacgatccggtggtgccgtcgtagttttcaccacgccaggcgttcacgttctgaccgagcaggttgacttcacgcacgccctgagccgcaagctgggcaatctcaaacagaatatcgtcggacggacggcttacctcttcaccacgggtgtaaggcaccacgcagtaggtgcaatatttattgcagccttccatgatggagacaaacgcggtcggcccttcggcgcgcggttccggtagacggtcaaacttctcgatttccgggaagctgatatctacaaccgggctgcggtcgccacgcacggagttgatcatctccggcagacggtgcagcgtttgcggcccaaaaataatatcgacatagtgggcgcgctggcgaatgtgctcgccttcttgcgatgccacgcagccaccgacgccgataatcaggtctggattcttctcttttaacagtttccagcgacccaactgatggaagactttttcctgagccttctcgcggattgagcaggtgttcagcagcagcacatccgcttcttccgccacgtcggtcagttgatagccgtgggtggcatccagcagatcggccatcttcgatgaatcgtactcgttcatctgacagccccaggttttaatatggagttttttggtcatcgacttgctcttgcgaaatagtagccaggaatgcagggcgcatagtgtaatgctttgctgccgttgtgaccagtatgagcgttatcagcccttaggggtaaaaatcctgtaaacttaaagcatattgctaacaggatgattgaccatgacaaatcaaccaacggaaattgccattgtcggcggaggaatggtcggcggcgcactggcgctggggctggcacagcacggatttgcggtaacggtgatcgagcacgcagaaccagcgccgtttgtcgctgatagccaaccggacgtgcggatctcggcgatcagcgcggcttcggtatcattgcttaaagggttaggggtctgggatgcagtacaggctatgcgttgccatccttaccgcagactggaaacgtgggagtgggaaacggcgcatgtggtgtttgacgccgctgaacttaagctaccgctgcttggctatatggtggaaaacactgtcctgcaacaggcgttgtggcaggcgctggaagcgcatccgaaagtaacgttacgtgtgccaggctcgctgattgcgctgcatcgccatgatgatcttcaggagctggagctgaaaggcggtgaagtgattcgcgcgaagctggtgattggtgccgacggcgcaaattcgcaggtgcggcagatggcgggaattggcgttcatgcatggcagtatgcgcagtcgtgcatgttgattagcgtccagtgcgagaacgatcccggcgacagcacctggcagcaatttactccggacggaccgcgtgcgtttctgccgttgtttgataactgggcatcgctggtgtggtatgactctccggcgcgtattcgccagttgcagaatatgaatatggcacagctccaggcggaaatcgcgaagcatttcccgtcgcgtctgggttacgttacaccgcttgccgctggtgcgtttccgctgacgcgtcgccatgcgttgcagtacgtgcagccagggcttgcgctggtgggcgatgccgcgcataccatccatccgctggcggggcagggagtgaatcttggttatcgtgatgtcgatgccctgattgatgttctggtcaacgcccgcagctacggcgaagcgtgggccagttatcctgtcctcaagcgttaccagatgcggcgcatggcggataacttcattatgcaaagcggtatggatctgttttatgccggattcagcaataatctgccaccactgcgttttatgcgtaatctcgggttaatggcggcggagcgtgctggcgtgttgaaacgtcaggcgctgaaatatgcgttagggttgtagccttacaacattgccggatgcgtgccaaccgtaggtcggataagacgcggcagcgtcgcatccgacattgaaggataagacgtgtcaacatcgcattcgacattgaatgaacgcagaaaagcaaaaagctcgccgaagcgagcttttttaatgtggctggggtacgaggattcgaacctcggaatgccggaatcagaatccggtgccttaccgcttggcgataccccaactgggtgcacttacaaggtaagcgtcttgaataaattggctggggtacgaggattcgaacctcggaatgccggaatcagaatccggtgccttaccgcttggcgataccccaacaaattggttttgaatttgccgaacatattcgatacattcagaatttggtggctacgacgggattcgaacctgtgaccccatcattatgagtgatgtgctctaaccaactgagctacgtagccagattgtttcttcgatggctggggtacctggattcgaaccagggaatgccggtatcaaaaaccggtgccttaccgcttggcgataccccaataaccgggcggtgaaccgcttactcgaagaagatggctggggtacctggattcgaaccagggaatgccggtatcaaaaaccggtgccttaccgcttggcgataccccatccgtacaacgctttctggtgaatggtgcgggaggcgagacttgaactcgcacaccttgcggcgccagaacctaaatctggtgcgtctaccaatttcgccactcccgcaaaaaaagatggtggctacgacgggattcgaacctgtgaccccatcattatgagtgatgtgctctaaccaactgagctacgtagccatcttttttttcgcgataccttatcggcgttgcggggcgcattatgcgtatagagccttgcagcgtcaacctctttttcaaggaaaattgctcgaaagtgactgtttggttaggttgcgaacagcgtggcgctatattcgtcaattattgtttactttgtgttttttcccaccctacagccattcttttgtcatacaggatgaaattcggaatttaacaatagtggtgggaaattaatctatgaaatactggcctacagtgatgagttgtcaaacagtgatgtggcaaacccggaacatttccttactgcatatcagaatcaacaagcacctcaataactgaaacagccccggatttcaccggggctgtttcgcatttcttacttatacgccgactggtgaacaccaaccgcgcgaccagacggatcgtccattttcttgaacgcttcatcccattcgatcgctttagcggaagaacaagcgacggaaggaccgcccggcacgcactcagcggcgctcggaagcgggaatagttcttcaaagatctcccgatacaagtacgcttctttagaggttggcgtgttgtacgggaagcggaagcgggcagtttccagttgctgatcagaaacctgctgcgcagccacttctttcagggtgtcgatccaactgtaaccgacgccatcggagaactgctctttctgccgccaggccacgcttgcaggcagatacgcttcaaaacattcacgcaggatgtgtttttccattttgccgttaccgcacattttatcctgtgggttaatacgcatcgccacatcaaggaattttttgtcgaggaacggaacgcgtgcttccacgccccaggctgacatcgctttgttggcacgcgcgcagtcatacatatgcagggccagcagtttacgcaccgtctcttcatgcagttctttggcattcggtgctttgtggaagtaaagataaccgccgaacacttcatcagaaccttcaccggacagcaccattttaatgcccatcgccttgatcttacgcgacattaaatacatcggtgttgaagcgcgaatagtggtcacatcataagtttcgatgtggtaaatcacgtcgcggatggcatccagaccttcctgtacagtgaagtgaatttcgtgatgcaccgtgcccagatggtttgccacttcctgggctgctttcagatccggtgaacccggcagacctacagcaaaggagtgtaactgcggccaccaggcttcagagcgttcctgatcttccacgcgacgggctgcgtatttcttggtgatagcggaaataattgaggaatccagaccaccagaaagcagcacaccgtaaggcacatcagacatcagatggcttttaactgaatcttccagtgcctgacgcagctcgtttttgtcggtcacgttatctttcaccgcatcgtagtcgaaccagtcgcgatgatagtaagaacggatttcgccgtcctggctccacaaatagctccccgccgggaactctttaatcgtgcggcaaactggcaccagcgctttcatttctgaggccacatacagctgaccgtgttcgtcataccccatatacagtgggatgatccccagatggtcgcgaccaatcaggtaggcatctttttcgctgtcgtacagtgcaaaggcaaacatgccctgcaagtcgtcgagaaattccggccctttttcctgatacagcgcgaggatcacttcacagtcagacccggtctggaactggtaacgatcgccatattcggcgcgcaatgcctggtggttgtagatttcaccgtttaccgccagtacgtgggttttttgttggttgtagagaggttgcgcccccgcgttaacgtcaacaattgacagacgttcgtgggcgagaatggcgttatcgctggcataaataccggaccagtccgggccacgatgacgcatcaggcgtgacagctcgagggctttcttacgcagctcaactgcgtctgttttgatatcgaatacgccaaaaattgaacacataaccttctccgttaacctggtatttgttgcttgttgtgtttgcttgtttaaaaaaatgccgcaaagcagcactgtgcgcaagcgatttggcggtgaaaaaataaaaaacgtaatggtgattgtcgattggtgaaaaaaggtctggtgtgaggatatatttattgatgaatcgataatttttagcgggttttattgaatgtttatattttacgggggccaaattgctgacaaagtgcgatttgttcatgccggatgcggcgtgaacgccttatccggcctacaaaagcatgaaaattcaatatattgcaggagctgcgtaggcctgataagcgtagcgcatcaggcagtttggcgtttgtcatcagagccaaccacgtccgcagacgtggttgctattcagataacgtcgatttcagcgactgacgggtaaatccagctggggcggaaaggcatactgtcgatatcgtcgagcgacgaaacaccagaaagcaccagaatcgtctccagacctgcctggaagccggccagaatatcggtacgcaggttatcgccgacaatcaccgtttcttccgaatgcgcctgcattttgtttaatgctgcgcggatgatccacgggctgggcttaccaacatagaacggtttgcgcccggagattttctcaatccctgcacacaacgcgccacaagcgggataaaaaccgcgcccgtgggtgtccggattggtggcgataaaacgtgcaccgttagcgacgaaataggctgctttatgcatcatgtcccagttgtaggaacgcgtttcgccaacaatcacgaaatcagggttcacatcggtaatagtgaaaccggctttgtacagttcatgaatcagtgcgccttcgcccaccacatacgctttcttgccttcctggcgacgcaggaaatcggcagtcgccatcgcagaggtataaaacacgctgtcaggtacatcgacacctgcggtggcaaagcggttcgccagatcttgcccagtctgcgaaggatagttggtcagcaacaccagcggcaggcctttatccataatcccgtgcaaaaattccgctgcacccggtacggcgacgttatcgtgcatcagcacgccgtcgatatcgcaaattacatttttaatggtcatggactacccagaatattgacaacaataagcgccactataaaagcacattaattttccagcaaatgctggagcaaaataccgttgagcatggcgcgttttaccagcgcaaaagcgccgattgccgagcggtgatccagctcagaacgtaccaccggcagattagtgcgaaacgccttcagcgcctgggtattaatgcagctttcaatagcagggagcagcactttatcggcttcggtgatttcaccggcaataacaattttttgcggattaaataagttgatagcaatggcgatggttttacccagatgacgaccgacatactcaattacttccgacgccagactatcgcctttgttcgcggctttgcagatagttttgatggtgcagtcgtccagcggcacgcggctctggtagccctgctttaacagattcaacacccgttgttcaatggcagcgttggcagcgatagtttccaggcagccaaagttgccgcagtggcagcgttcacccagcggttcgacctgaatatggccaatttcaccgacgttgccgttgcggccaataaaaatgcgcccgttagagataatcccggccccggttccgcgatggacacgcaccagaatggagtcttcgcaatcctgacttgcaccgaagtagtgctccgccagcgccagactacggatatcgtgaccaacgaaacaggtcactttaaaacgttcttccagagcttctaccagcccccagttttctacctgaatatgcggcatgtaatgaattttgccgctgtccgggtcaacaagccctggcaggatcaccgaaatcgcgatcagctcgcgcagtttgcgctggtagctatcaataaactgagcaatggcattcaacagggcatgttccagcgtttgctgggtacgttccggcagcgggtaatgttcttctgccagcactttgctgctgagatcaaacagagtgatggtggcgtcatgacgaccaagccgtacgccgattgcgtggaaattgcgggtttcggtgacgatggagatagcgcggcggcccccggtggaggcctgctgatcaacttctttgatcagcccgcgttcgataagctgacgcgtaattttggttacgctggcgggggcaagctggctttgctcggcaatctgaatccgcgagattggcccgtactggtcaatcaggcgataaaccgccgcgctgttaagctgttttacgagatcaacattacctatctgagcttgtccgcctggtgtcatactttctcttattgagttacgacctcgttaccgttaacgatggtcttggtgattttaaaatcaggtgtgaatgcagtcaggttggctactttacctgcggcgagtgtgccgagacgtttctcaacgccaatcgcacgcgccggatagagcgtcgccatacgtagcacttcatccagtgcgataccgcaatgttcgaccagattacgcacgccttcaatcatggttaaggatgaaccgcttaacgtaccgttctcatccacacaaagtccgttacggtagtatattgttttacccgcaaaaatgaactgttcaatgttggcacctgctggcgcggtggcgtcagtaaccagacacagtttgtcgcctttcagacgtttagcgttgcgaatgttggcgtaatcaacatgcaggccatcagcaataataccgcaataaatgtcagcttcgtcgaggatcgcgcccgccaggccaggttcacgaccggtaatatacggcatcgcgttgtacagatgggtggcaaaggtaatccccgcgcggaaaccggcttttgcttctttcaacgtcgcgttggagtgaccggcagaaaccacaatcccggcatttgccagtttgctgatgacttccgcaggaaccatttccggtgccagggtcactttggtaatgacgtcggcgttttcacacaggaaatcgaccagcgcggcatcaggcttacgcacaaaattcggattatgggtgcctttttttaccagattcagccacggaccttccagatgcagacctaacgcctgattcggatgttttgccaggtactcgcgcataacgcgcacgccctgtttcatcagctcatcgctggtggtgataagcgtcggcagatagttagtacagcctgatttctcattggctttctgcatgatttccagcgtttccacgctgaccgcttcagcggtgtcgttaaactgtacgccgccgcagccgtttaactgcacatcgataaaaccgggggagagaatggccccgttcagtgaacgttgttcgatctctggcggcagttccgctaccggacagacgcttttaatcaggccatcagcgataacaaccgcgtggtcatcaagaaattcgtggccggtaaagatccggccctgggttaatgcatacattctgacccccgattttaaaaaatattgccctgagcaaggagccagggcagggataacaattacagacctttgatattttctgcttctaattcattgaaatatcttaaagtcttaactttcagctccatggtggaaggttcatcgcacaccatgatcgctttcggatgcagttgcagacagctgatggtccacatatggttcacgcaaccttcaacggcggcctgcagcgccagtgctttctggctacccagcaccagaatcatcacttcttcggcatccagcagtgtaccaacaccgacagtcagggcatattttggcacctgattaacatcgttatcaaagaaacgagagtttgcgacgcgagtgtcatgagtcagggttttgatacgagtacgagaagccagagaagacgccggttcgttaaatgcaatatgaccgtcgttacctacaccgcccataaacagatgaatttttccgtaagaacggattttttcttcatactggcggcactcggcgtcgatatccggggcgttgccgttgagaaggttgatgttttctgctggaatatcaacgtgatcgaagaaattacggtgcataaagctgtagtagctttccggatgctctttcggcagaccgacatattcgtccatgttgaaggtgacaacgtgcttaaagctgacctggcctgctttatgcatttcgactaacgctttataggtggtcatcggcgtgccgccagtcggcaggcccagtacaaacggacgatcggcagtcggtttgaacgcattgatacgattgacgatatggcgagcagcccatttgccgacctgttcagcggtagtcagggggatcagtctcattattcacctcaataagtaaaatgtaagccgttggcggattaggcatctttaagcgtaacctggatttgcgcagacaggcgtcaatccgacctgattttttgaatgataaaataagttttctggtttagccagtaaaagggagtgataataacgatatttggtgacaaaactcacaaaagacacgcgtttaatttgcgatacgaattaaattttcacacactctgtagcagatgatctaacaatctgattacagaacatcggcagtacaatttgcagcaaaataaaaatacggcttgaaacgagccaaatagggttctcgtagggggaataagatgaatattttaggttttttccagcgactcggtagggcgttacagctccctatcgcggtgctgccggtggcggcactgttgctgcgattcggtcagccagatttacttaacgttgcgtttattgcccaggcgggcggtgcgatttttgataacctcgcattaatcttcgccatcggtgtggcatccagctggtcgaaagacagcgctggtgcggcggcgctggcgggtgcggtaggttactttgtgttaaccaaagcgatggtgaccatcaacccagaaattaacatgggtgtactggcgggtatcattaccggtctggttggtggcgcagcctataaccgttggtccgatattaaactgccggacttcctgagcttcttcggcggcaaacgctttgtgccgattgccaccggattcttctgcctggtgctggcggccatttttggttacgtctggccgccggtacagcacgctatccatgcaggcggcgagtggatcgtttctgcgggcgcgctgggttccggtatctttggtttcatcaaccgtctgctgatcccaaccggtctgcatcaggtactgaacaccatcgcctggttccagattggtgaattcaccaacgcggcgggtacggttttccacggtgacattaaccgcttctatgccggtgacggcaccgcggggatgttcatgtccggcttcttcccgatcatgatgttcggtctgccgggtgcggcgctggcgatgtacttcgcagcaccgaaagagcgtcgtccgatggttggcggtatgctgctttctgttgctgttactgcgttcctgaccggtgtgactgagccgctggaattcctgttcatgttccttgctccgctgctgtacctcctgcacgcactgctgaccggtatcagcctgtttgtggcaacgctgctgggtatccacgcgggcttctctttctctgcgggggctatcgactacgcgttgatgtataacctgccggccgccagccagaacgtctggatgctgctggtgatgggcgttatcttcttcgctatctacttcgtggtgttcagttcggttatccgcatgttcaacctgaaaacgccgggtcgtgaagataaagaagacgagatcgttactgaagaagccaacagcaacactgaagaaggtctgactcaactggcaaccaactatattgctgcggttggcggcactgacaacctgaaagcgattgacgcctgtatcacccgtctgcgccttacagtggctgactctgcccgcgttaacgatacgatgtgtaaacgtctgggtgcttctggggtagtgaaactgaacaaacagactattcaggtgattgttggcgcgaaagcagaatccatcggcgatgcgatgaagaaagtcgttgcccgtggtccggtagccgctgcgtcagctgaagcaactccggcaactgccgcgcctgtagcaaaaccgcaggctgtaccaaacgcggtatctatcgcggagctggtatcgccgattaccggtgatgtcgtggcactggatcaggttcctgacgaagcattcgccagcaaagcggtgggtgacggtgtggcggtgaaaccgacagataaaatcgtcgtatcaccagccgcagggacaatcgtgaaaatcttcaacaccaaccacgcgttctgcctggaaaccgaaaaaggcgcggagatcgtcgtccatatgggtatcgacaccgtagcgctggaaggtaaaggctttaaacgtctggtggaagagggtgcgcaggtaagcgcagggcaaccgattctggaaatggatctggattacctgaacgctaacgcccgctcgatgattagcccggtggtttgcagcaatatcgacgatttcagtggcttgatcattaaagctcagggccatattgtggcgggtcaaacaccgctgtatgaaatcaaaaagtaatctgctttatgcctgatgcgacgcttgagcgtcgcatccaacaatgacaagcggtggagatcttctctgccgctttttttttcatcaatcatccccataatccttgttagattatcaattttaaaaaactaacagttgtcagcctgtcccgcttataagatcatacgccgttatacgttgtttacgctttgaggaatccacgatgagtgaggcagaagcccgcccgactaactttatccgtcagatcatcgatgaagatctggccagtggtaagcacaccacagtacacacccgtttcccgccggagccgaatggctatctgcatattggccatgcgaaatctatctgcctgaacttcgggatcgcccaggactataaaggccagtgcaacctgcgtttcgacgacactaacccggtaaaagaagatatcgagtatgttgagtcgatcaaaaacgacgtagagtggttaggttttcactggtctggtaacgtccgttactcctccgattattttgatcagctccacgcctatgcgatcgaactgatcaataaaggcctggcgtacgttgatgaactgacgccggaacagatccgcgaataccgcggcaccctgacgcaaccgggtaaaaacagcccgtaccgcgaccgcagcgttgaagagaacctggcgctgttcgaaaaaatgcgtgccggtggttttgaagaaggtaaagcctgcctgcgtgcgaaaatcgacatggcttcaccgtttatcgtgatgcgcgatccggtgctgtaccgtattaaatttgctgaacaccaccagactggcaacaagtggtgcatctacccgatgtacgacttcacccactgcatcagcgatgccctggaaggtattacgcactctctgtgtacgcttgagttccaggacaaccgtcgtctgtacgactgggtactggacaacatcacgattcctgttcacccgcgccagtatgagttctcgcgcctgaatctggaatacaccgtgatgtccaagcgtaagttgaacctgctggtgaccgacaagcacgttgaaggctgggatgacccgcgtatgccgaccatttccggtctgcgtcgtcgtggttacactgcggcttctattcgtgagttctgcaaacgcatcggcgtgaccaagcaggacaacaccattgagatggcgtcgctggaatcctgcatccgtgaagatctcaacgaaaatgcgccgcgcgcaatggcggttatcgatccggtgaaactggttatcgaaaactatcagggcgaaggcgaaatggttaccatgccgaaccatccgaacaaaccggaaatgggcagccgtcaggtgccgtttagcggtgagatttggattgatcgcgccgatttccgcgaagaagctaacaagcagtacaaacgtctggtgctgggtaaagaagtgcgtctgcgtaatgcttatgtgattaaggcagaacgcgtcgagaaagatgccgaaggtaatatcaccaccatcttctgtacttatgacgccgataccttaagcaaagatccggcagatggtcgtaaagtcaaaggtgttattcactgggtgagcgcggcacatgcgctgccggttgaaatccgtttgtatgaccgtctgttcagcgtgcctaacccaggtgctgcggatgatttcctgtcggtgattaacccggaatcgctggtgatcaaacagggctttgctgaaccgtcgctgaaagatgcggttgcgggtaaagcattccagtttgagcgtgaaggttacttctgcctcgatagccgccattctacggcggaaaaaccggtatttaaccgcaccgttgggctgcgtgatacctgggcgaaagtaggcgagtaattttaagtttcgctatgccggatggggcgtttacgtcgcatccggcaaggaacagacaaacagtttcaaacgctaaattgcctgatgcgctacgcttatcaggcctacatgatctctgcaatatattgagtttgcgtgcttttgtaggccggataaggcgttcacgccgcatccggcaagaaacagcaaacaatccaaaacgccgcgttcagcggcgttttttctgcttttcttcgcgaattaattccgcttcgcaatttatccataaaataaatttaaaataacaaaacataattaaataaaatgtaaccgctttcatcttgctggaatttcacgcttttattcttctgcaagcctttcaaccgcaaacttaagccttgtaacaaaaatcatcaaaatatgtgcggttgctcatgttcttacattctggttacagaaagagattgataattcgcgtcgcgaaaaatagtctgttcctgtagtcagcgagacttttctcaacgctacttttttaatttttattttttcgctgttcacctttggtgcagcaatttatacgtcaaagaggattaacccatgcgtacgtttagtggcaaacgtagtacgctggcgctggctatcgccggtgttacagcaatgtcgggctttatggcaatgccggaggctcgcgccgaaggattcatcgacgattcaaccttaaccggcggtatctattactggcagcgtgaacgcgaccgtaaagatgttaccgacggcgacaaatacaaaaccaacctttctcactccacctggaatgccaacctcgattttcagtccggttatgctgctgatatgttcggccttgatattgctgcgtttacggcgattgaaatggcggaaaacggcgacagctcccacccgaacgaaatcgcgttttcaaaaagtaataaagcctatgacgaagactggtccggcgacaaaagcggtataagcctgtataaagctgcggccaaatttaaatacggtccggtttgggcgagggcaggttacattcagccaactggtcaaacgctgttagcgccgcactggagctttatgccaggtacttatcagggggcggaagccggggcgaattttgattacggcgatgctggtgcgttgagtttctcctacatgtggaccaacgaatacaaagcgccgtggcatctggaaatggatgagttttatcagaacgataaaaccaccaaagttgattatctgcactcctttggggcgaaatacgacttcaaaaataacttcgtactggaagcggcatttggtcaggcggaagggtatatcgatcaatattttgccaaagccagctacaaatttgatatcgccggtagcccgttaaccaccagctaccagttctacggtacccgagataaagttgacgatcgcagcgtcaacgacctttatgacggcaccgcctggctgcaagcgttgacctttggttaccgggcggctgacgtagtggatttgcgcctcgaaggcacctgggttaaggctgacggtcagcagggatacttcctgcaacgtatgactccaacctacgcttcctcaaacggtcgcctggatatctggtgggataaccgttctgacttcaacgccaacggcgaaaaagcggtcttcttcggtgcgatgtatgacctgaaaaactggaatcttccaggcttcgccatcggcgcttcctacgtttacgcatgggatgctaaacctgcgacctggcagagcaatccggatgcgtactacgacaaaaaccggactattgaagagtctgcctacagcctggatgcggtctataccattcaggacggtcgcgccaaaggcacgatgttcaaactgcatttcaccgaatacgacaaccactccgacatcccaagctggggcggtggttacggcaacatcttccaggatgagcgtgacgtgaaatttatggtaatcgcaccattcaccatcttctgatgcccgacgcggcaggttttgtgcctgccgcacgtttgaggaatttgctatgaaaaaactgattctcatcgccataatggcatcggggctggtagcttgtgcgcaatcaaccgcgccacaggaagacagtcgtctgaaagaggcatacagcgcctgtatcaacaccgcacaaggttcgccagaaaaaattgaagcctgccagagcgtgttaaacgtgctgaagaaagagaaacaacatcagcagtttgccgaccaggaaagtgtacgcgtactggattatcagcagtgtctgcgtgcaacgcaaaccggaaatgatcaggcggtgaaagccgattgtgataaagtctggcaggaaatacgcagtaataacaaataagtgagagctgtaactctcgcttttcttatttcccttgcataaaaaagccaacccgcaggttggcttttctcgttcaggctggcttatttgccttcgtgcgcatgttcatcttcgcggcaatcgccttcggcacagtgaccgtaaagatagagactgtggttagtcaggcgaatgccatgttttgcggcaatttcacgctgacgcgcttcgatggaatcatcactaaattcgataaccttgccgcagtcgaggcagatcaggtgatcgtggtgatgttgctgtgtcagttcaaatacggatttaccgccttcaaaattgtggcgggtgacgataccagcgtcgtcaaactggttcagtacgcgatataccgtagccagaccaatttcttcacccatatcgatcagacgtttgtataaatcttccgcactgacgtgatggttgtccggctcctgaagaacttccaggatttttaaacgaggaagcgttactttcaggccagctttctttagggcggtattgttatcagtcatgcggaatctgtcctgttactaagcggttcacttcattagaagaagtgacagaatttgctcttgagataatgcgtatcattatagaattgccacgcctaaatgaaaaccacaagtccctggcaaatattgttaataaaaacgtggcacagcttacatttacaacggcaaggccacttgaacaccgggacattgtacaggtacaacagcaaaagttacaaatttgtagcaattattttgattggcattatctattaatacggcgtagacatgagtctacgccgcatcacatcaggcattgagaatttcgtcgagatgcaactcttcagaaatctgtttaacccatttttctacacgttcagcggtcagttccggctgacggtcttcgtcgatagccagaccgacaaagtggtcgtcatctgccagaccttttgatgcttcgaaatgatagcccgcagttggccagtgaccaacgatggttgcaccgcgcggttcaatgatgtcgcggatggtgcccaatgcgtcgcagaaatattcggcgtaatcttcctggtcaccacaaccaaacagcgcaaccagtttgccgttgaaatcaatctcttcgagagtcgggaagaagtcatcccagtcacactgcgcttcgccgtaataccaggttgggatgcccagcagcagaatgtcataagcttccagatcttctttgctgctttttgcaatgtcatggacatcggcaacgtctttaccaagctgtttttgaatcatttttgcgatattttcggtattaccggtgtcgctgccgaaaaagatgccagtgatagccatgagtgaaataacctcttgaaacttattgaaatgggggtggaaaattgcccacggataaaggcaatcatagcagaacaggcagtcttgcggaatcagcaaacgagcaggactgcacactgtgctacatgaaagtggaaatttaaacgatgccctgactacgcagcgccgccagttgctgcattaacatctcttcgatcagttcgctacggctcatattgcgcgactccgccagctcgttcagcgcctcgacagcttccgcgttcagcttcagttcgacacgcttaaggccacgtactttgtcgcgttttagctggttgcgtttattaatacgcagctgttcatcgcgcgaaagcggattagttttcggtcgtcccggtcgacgctcgtgcgcgaacagatctaatgtcgtacggtccgtttgttctttggccatgatcttggtgacttcgggggaaacaatcagccaggcctctgcccggatggatagcgcgccataatacatcagcgcgatgagtcacgccaacgcccacgcgcggaaagcgacgcggacgctgggtttttaatcagttgcgttaatcattgagatagcgacggatagcgcgtaataccgcatccggtttttcagcatggacccagtgacccgcgcctgcaatcacatgcgcccgtgcctgtggaaattgagccagtaaatcatcacggtactgctcgctaacatacggagaattgccgccagggataaacagggcagggtgatcccatgccgggattttctcccaacctacaatatgcggatactgatcccacaataccggcacgttaaagcgccactccccgtcaacaaaagatttcagcagaaactgaatcaccccttcttcattaagatgctggcgcattattgctgctgcttgctggcgagtttgtgcgtccgattcactgaccgcgttgatagccgcaaaaatctcatcatgacggcgtacgtgatagtcgaccggcgcgatatcgatcgccaccagtttatcgatgcgatcggaggctagtgcagtaagtgccattaccgctttaccgcccatggagtgaccgataaatgttgctttgtcgatctgctgtgcatccagagtatcaacaagatcctgcgccatcgccgggtaattcattaccggatctctcggtgaaagaccgtggttacgcatatcaacctggatgatattgtgatcgtttaccagatcgcgagccagtacgccaaggttgtcgaggctgccaaacagaccgtggacaagaacgatgggagaattattgtgctggttttgtgcagtttgcgcgcggatattcaatttcatggcaaagttctttttttcgcgttgtcgggttagggtattatgttgaccattgtgccacagggctgcaacaaataaggtttattccgagtttttctgcaagccaggcttgacgctatccgctgccgggatttattcatatactcctggcgacttgtattcagctaagacactgcactggattaagatgaaaacgattgaagttgatgatgaactctacagctatattgccagccacactaagcatatcggcgagagcgcatccgacattttacggcgtatgttgaaattttccgccgcatcacagcctgctgctccggtgacgaaagaggttcgcgttgcgtcacctgctatcgtcgaagcgaagccggtcaaaacgattaaagacaaggttcgcgcaatgcgtgaacttctgctttcggatgaatacgcagagcaaaagcgagcggtcaatcgctttatgctgctgttgtctacactatattctcttgacgcccaggcgtttgccgaagcaacggaatcgttgcacggtcgtacacgcgtttactttgcggcagatgaacaaacgctgctgaaaaatggtaatcagaccaagccgaaacatgtgccaggcacgccgtattgggtgatcaccaacaccaacaccggccgtaaatgcagcatgatcgaacacatcatgcagtcgatgcaattcccggcggaattgattgagaaggtttgcggaactatctaaaacgttgcagacaaaggacaaagcaatggcaatccacaatcgtgcaggccaacctgcacaacagagtgatttgattaacgtcgcccaactgacggcgcaatattatgtactgaaaccagaagcagggaatgcggagcacgcggtgaaattcggtacttccggtcaccgtggcagtgcagcgcgccacagctttaacgagccgcacattctggcgatcgctcaggcaattgctgaagaacgtgcgaaaaacggcatcactggcccttgctatgtgggtaaagatactcacgccctgtccgaacctgcattcatttccgttctggaagtgctggcagcgaacggcgttgatgtcattgtgcaggaaaacaatggcttcaccccgacgcctgccgtttccaatgccatcctggttcacaataaaaaaggtggcccgctggcagacggtatcgtgattacaccgtcccataacccgccggaagatggtggaatcaaatacaatccgccaaatggtggcccggctgataccaacgtcactaaagtggtggaagacagggccaacgcactgctggccgatggcctgaaaggcgtgaagcgtatctccctcgacgaagcgatggcatccggtcatgtgaaagagcaggatctggtgcagccgttcgtggaaggtctggccgatatcgttgatatggccgcgattcagaaagcgggcctgacgctgggcgttgatccgctgggcggttccggtatcgaatactggaagcgtattggcgagtattacaacctcaacctgactatcgttaacgatcaggtcgatcaaaccttccgctttatgcaccttgataaagacggcgcgatccgtatggactgctcctccgagtgtgcgatggcgggcctgctggcactgcgtgataagttcgatctggcgtttgctaacgacccggattatgaccgtcacggtatcgtcactccggcaggtttgatgaatccgaaccactacctggcggtggcaatcaattacctgttccagcatcgtccgcagtggggcaaagatgttgccgtcggtaaaacgctggtttcatctgcgatgatcgaccgtgtggtcaacgacttgggccgtaaactggtagaagtcccggtaggtttcaaatggtttgtcgatggtctgttcgacggcagcttcggctttggcggcgaagagagtgcaggggcttccttcctgcgtttcgacggcacgccgtggtccaccgacaaagacggcatcatcatgtgtctgctggcggcggaaatcaccgctgtcaccggtaagaacccgcaggaacactacaacgaactggcaaaacgctttggtgcgccgagctacaaccgtttgcaggcagctgcgacttccgcacaaaaagcggcgctgtctaagctgtctccggaaatggtgagcgccagcaccctggcaggtgacccgatcaccgcgcgcctgactgctgctccgggcaacggtgcttctattggcggtctgaaagtgatgactgacaacggctggttcgccgcgcgtccgtcaggcacggaagacgcatataagatctactgcgaaagcttcctcggtgaagaacatcgcaagcagattgagaaagaagcggttgagattgttagcgaagttctgaaaaacgcgtaaacacatttaataaaaaaagggcggtcgcaagatcgcccttttttacgtatgacaaacacagaattgcctgatgcgctacgcttatcaggcctacgaggatggtgcaatatattgaatttaagcgattttgtaggccggataaggcgttcacgccgcatccggcaaaaacaacgaacactttgtcaacaaactgagtagctcaaggaaatcccaatgaagaccaacaggagtctggtcgtcatagtgtcactaattaccgccacattactgctgactgcatgcgcccaacctgaacaatcatcattagctggcgactggttactgacccctaaagataaaaccagaggattaacgggtagcattgcggtaaatattgcacctttccggtgtaagacaaattgccgtggtgataacttacctgataatacccgccgctggcagttgtcaggcgggaacgaaaaagaacttacttatcttcataatatgtcagcacaagaaaaggtcggtttaaatcccggttggcaatgctacacctcattttttatgcgggtttgccagggcaagcccggcactcgaccgatagtcaatgaggattatgtcagcgaaagcggattttttggctcgatgatgcatgtcgggattattgagttacgacgctgccagtcagaaaattgccagcaagaattgaaagcgataaatacacattaaaatagtgagtccgggaatgaaacccggacctgaacatgtcttattgcgtgaatgtttctttcatttgatactgcatttcccagagttcagtaagcgaaataacttttcttgttcttgcttcttcactttgtacccataagaaagggtagaacgtgaaggcttccgttgccgataattttattacgtcttctcgccattgctgccatcgtacattttcatagaaggtatctaaatcaccggataatgcccactgaagaaactcagaatatccaacttccagactttcccaattcagcgtatctggcgcaaaataataaacgcagccagtatcttccccaagatcgccaccattaagagcaaaaattacccctgcgacatcgtcagcgatgggtaaagcccgcacgcctgcgaattcagggcgttgtgtccaacttactggatctcgtggcaaccgggggtgaccagatcctgctatgcgtaactaaccattatcaatcagcagacctccggagccatagacaagcgcacccatcggtgattttgttgtcacctgtaattgataaagtgcggtttcggctaaatctttattaaccggtaagagttcggtatggtttgtggcgtcttttaaccagttctggattattggccaggctgaatcttcagtatttactaactgattcatttcacgcatcgctacttgctccttgtgtgctacggtgtcatttatgatgaggaattgtatggaacattttttaaatattaagttccttatatttgaataaaaaatgactttatccatacattgccacttttttcaaagcataaaccgatacccaataccggtttcagtaataaaatggcgaggccgggccggatcctgttccagtttttgtcgcagatgccccatataattacgcaaatagttgctgtgttcgatcgcgtttagaccctacatctgccggatgcggcataaataacgaactatttgccaacaaacagaaagggcgatcattcaatcgcccttttttactttgttttattaaccgtgtttatttttcagttcaaagcgtggtgataccagaccatacagtgtccaaccaaggaaggtcacgatggaaccgtacagcatggcttcttccccggatgagtacagcgcataaaagctatacatcgcgccaacaaaagcaacaaagtttgcaactttcgcttttgaggggggcacattagcgaccttctgaataatgactaatgccgccattgacagaatatacggaatgatattggtcaccacggccaggttaaccagcacgttgaactgactgtttagcgacgggctaatggtcatcagtgccaatccactctgaataatcacaatggtcaacattccctgcaccggtgcatccactttggttacacgggagaaaattttagggaagtagccttcatcagatgaagatttaaacacctgggcaatggtgaactgccagccaagtagcgaaccgcagcaggacatcaccatcagcgccataatgactttacccacttccggcgtgaacatctgcgcgaaggccagaccaaatggtgccgttgaatttgccagctccatatttggcacaatcccggcaatcacgttggtggagacgatataaatcaccgccgcacctaacgtaccgccgagtaccgcgattggcacattacgttccgggttttccactacatcagtattcgcacacgcagactccagaccaagaaaagcccacagcgtcatagcgatggaagaacctaccgcactgaagaacggtgcatgatgcggattccaggaatcaacgtacagcgtcgggctaaaccagaaccagccaataatgcacagaccgacgaccggaataatgaccccccacacggtaatgctactgatttgcccggtaatgcgcgcaccaccaaagttagccacggtacaaatccacagcaccccgatggtcgcaagaccaatctgcactggcgacaaactcgcgccgagcagttcggtgccgtaaccaaccgccgaaatagcaatcgcgacgttagcaatcagcagtgagacgccgtaggtatagttcgccataaagttaccggatttaccgaaagcatactcggcataaccgcccataccgcctgatttacggctgaacataccgcattttgcgaatgcccatgccagtgccattgagcctacggctgtcaccagccaggagataattgagattgtcccgacttcggcaagctttgtcggcagcatgatgataccggagcccatcatgttgaccatcgtcagtatggttaactgaacgacgcccattttgttcgatttagcctgactcataatttttcccctttcaacagggtgctttgcgcatcacgaggcttgatgacatagcaccaaacttgcttacgaccatcatgttcttcgatatagacaccctgcagctccggtgcaaaacctggcagcaggttgatcccttcttccagagcgctgaagtaacgcagaacagcaccaccccagatttcacccggaacaacacacagcacacccggaggataaggaagcgcaccttcggcagcgatacggccttctgcatccggcagacgaaccagttccacttcaccgcgtaaataggcgtagttggcttcttgcggattcatgctgacgcgtgggaagtgctccttacggaacatctctttttgcagttgtttcacgttgtggcgggcatacaaatcatgcatttcctgacacaactgacgcagggtataaccggcgtagcgctcttcatgctgtttgtagatggaaggtagcacttctgctaatggcgcgtcggactcaagcagtttttcgaagcgtaccagcagggcaacaagttgctgaagtttggccatatcttctgccggagtcagcaggaagaggatggagttaagatcgcatttttccggcactacgccattttcgcgcaggaagttagcaagaatcgtcgcgggtacaccgaacgcttcatattcgccgttacgtgcatcaatacctggggttgtcagcaacagtttgcatggatcgacaaagtattgattctctgcatagccttcaaaagaatgccagtgttcccctggtacaaactggaagaagcgcagatcaaccgcaatttgcgctgtttcatacgactgccagggtttaccatccaccagttcaggtacgaacggacgaatatgctgacagttatcgaggatcagtttgcgggcattaatgccatttaccacacaatccatccacatattacgaccgctgacaccttcatgcattttggcgttgatattcagtgcggcaaacagcggatagaacgggctggtggaggcgtgcatcataaaggcgttgttcatgcgtttgtgcggtacataacgctgttgccctttgatgtggctgtcttttttatgaatttgtgaagtctgagaaaaaccagcctgttgtttatgcacagattgcgtaaccagaatacccggatcgttctcattaagatccagcaacagcggcgaacagtccgccatcatcggaataaactgttcatagccgacccatgctgagtcaaacaggatgtagtcacacagatgaccaattttatccaccacttggcgggcgttataaatcgtaccgtcgtaggtgcctaactgaatcacagcgaggcggaaaggacgagcctcttttgcccgctgcggtgcgacttccgcgatcagctcacgcaggtaactttcttcaaaacagtgcgcatcaatgccaccgataaagccatacgggttacgtgccgtttccagataaaccggtgttgcaccagcctgtagcaacgctccgtggtggttagatttgtggttattgcgatcaaacagcaccagatcacccggtgttagcagggcgtttaaaaccactttgttagaagatgaagtgccatttaaaacgaagtaggttttatcggcattaaacacttttgccgcatgttgctgtgcaatgcatggcgcgccttcgtgaatcagcagatcgcccatcgctacgtcggcgttgcacaagtcggcacggaacagcgcctcaccaaagtattccacaaactgattccccgccggatggcgacggaaaaattcgccgccctgatgaccagggcaatcaaacgcgctgttaccttgattgacataatcgaccagtgcgcggaagaaaggtgggcgcagttgagtttcataatggctggcagcggtttctaactggcgaccataaaattctcgtcgcgattcgcaattctcaaagacacccgaaatacggggcaaatactctgcgggtacacgttcttgattttcagtagcaataaataccgggatgccataacccgtggcatcgatttcatcgagttttccgcatgtaacatcgttgagcgataaaactattgccgccacatcgatattacgactttcattaatgtagatacattctcgctgcgtggtaaaacagtccgggcaagaatcactaaccgcaatttttaattttgacatttttcatctctttattttaggtaatagcaggtcctcaatttctcgaatgagaaatcgatcgtgccggaaaaaagcaaagttaccccgctgataaataaatcaggtagattgcttttttcagaatgcagaaacccttaccagtcaggtggctgataatacaagggttaacagagaatgagcactgcggaatacaggcatatgcctgtaatacagagagtcaggaagacctgtacgctgaagtgcccttagtcggtagactaacgggcattgaagaagtgaaagtcgaagctattgcgatgagcaaacttcataatatgagttgtccgccttatatggggcatagtgcggctgttattttccatttaatttacctttcctgatgtgaatgaaggtgaagatattctatccaggaaatacggttgaactgtgaaggtgatcaataaaaaatgatcaatcttaatttatttaatgatgagctttttactcagtaatataaaatattgaattgttatttttgtgtgttgtttaagataaaaagccgtatttattattacggctttaattaataaaaggcaggctgtattaaaattaatattcaaagcataaaccgatagccaataccggtttcagtaatgaaatggcgtgggcgggcgggatcctgttccagtttttgtcgcagatgtcccatataaatacgcaaatagtgactgtgttcgaccgcgtttggcccccacacctggttaaggagctggcgctgggtgagtacttttccggcattgttgagcagcaccgccagcaggcggaactcaattggtgtgagatgcacctcttcctcaccccggtgaatcacgcgggcggctaaatcgacggtaacatcggaaaattttaccagcggatcgggcgcggtggtggcagagtggcggcgtaatgcgacgcgcagacgggcctgcaattcgccaatgccaaacggcttactcagataatcatccgctccggcatccagcgcggcgattttgtcgctctcttcgctgcgtgcggaaagcacaatcaccggcaccgcgctccactggcgcaggtcgcggataaactcaatcccatcaccatcgggcaggccgagatcgagaataatcaaatctggcttacgggttgccgcttccagcaagccgcgttgcagcgtttcggcctcaaagacgcgcatcccgtcgccctccagcgccgtgcgcagaaagcgacgaatagcctgttcatcttcaacaatcagaacgtttgtcacatatcctcatgaaattcttcaagttcaggggcagtttgctggggaagtgtaacacgaaaacaggcaccaccttccggtcggttgaacgcggtaatagtgcccccgtgtacatccactatcgcccgacaaattgccagtccaagccctacccccggtactgccgactctttattcccgcgagcaaacttatcaaatatcgtctgctcctggcctggcggaagaccggggccgttatcccagacatccagttgtagattttcgccctcaacgtgggcatcgataccaatttcggcctgcgcacccgcatatttcaccgcgttctccagcagattaatcagcacccgttcaaagagtggcccgtcaacgtggattaaggtcagcggttctggcagagaaagattgatgggcgacgataaacccggttccagcatttgcagcgcgctgccgactacttcttccagcgttaaccactctttcttcaaattaaagccgccggactgaattcgcgccatatccagtagattattcaccagtcgggtagtgttcagcacatgctgacggatctcgctggcctggcgggcgtggggtgatccttcgcttgccagatcgagcgttaagatttctgcctgaccaaacagcaccgtaagcggcgtgcgtaaatcatgcgaaagcgccgccagcagggcgttgcggatctgttcacgttcgcttgccatccgcgcctgttcttcgctggcggttagcgtcagccgctcaagggcattggcgactaacagcgtaaacgtctccagcaggcgctgctgttccgggatcatcaactggcgcagattccccggctccaccaccaccagcccgtaggttttctcgccgctttttagcggcaaaatctggtacggtacaccgggtaacgtgtcggtgcccgcgcccgcaggcaggcctttatcaaaactccactgcgcgatggcatcgtcccacggcgtcattccttgcggatgtgttaacggctgcaatttaccgttgtcatcgggcaacaacacctgactgcgggcatgaaacgtggaggcaataaattgttcgctggtggcagcgatatcctgcggactgcggcccaccgccagagctttcgacatttcatataagtgccgtgtgcgttgctcgcggtaacgggctacccgcgcctgataacgcacgccagcagtaaggttcccgatcaccagcccgacggttaacatcaccgcgaaggtcagcagatattgcacatcagagacggcgagcgtgccgcgtggggcgataaaaaagagatcgaaactcactacattaatgacggtggcaaccactgaaggccagcgtccataaaatagcgccaccaccaccacgccaagcagatacagcatcaccaggttggcggcatcaaacgccatcagccactgcatggcaattaaggtgataacggcgcataacgcggcggcaaccacgcatccctgaatttgtacacgccacttgtctttaaaagagcggttatccggcgcgttgttaatcgtgcgggcgggtggttcatcaagcgcgaccagcacctgatcgagatcgggggcgatgcgcgccagtcggtcagcaaacgtttcccgacgccaccagcggcgcgaggccgggcgaccgagaataatcttgccgagattatgttcacgggcataacgcactaccgctttctcttccgctggatcagaaagtgttgccgtctccgcgcccagttcctgcgccagacgtaaggcgctgagaattgcccgacgttttttttccggtaagcggtgcagggcaggggtttcaacatacaccgcgtgccagacgctacccagccgtgacgccagccgcgccgctgcgcggaccagtttttcgctgccggtgttatggccgatgcataaaaggatcgcgtcgcgcgtgtgccacactttctcttcgccaggatgcccccgccaggcgcgcatttgctcatcaacgcgatcggcagtacggcgcagtgccagttcgcgcagggcgatcagattacctttgcggaaaaaatgttcaatggcgcgctccgcctgcccggcaatatagactttgccttctttcagccgctggcgcagatcgtccgggggcaagtccaccagcaccacgtcgtcggcggcatcgaaaaaaggatcgggcacggtttcccgtacctgaattccggtgacgccgctgaccacatcattcagactttccagatgctgaacgttgacggtagtgaaaacatcaatgccagcttccagcagttcttcgatatcctgccagcgtttgggatgacgggaacctggcgcattactgtgcgccagttcgtccattaagatcagcgccgggcggcgggcgagggcggcatcgagatcaaactcgctgatatgccgcccacggtacgcctggcgttttaacggcagaacagccagcccttccagcatggcggcggtatcttttcgcccgtgggtttctaccacgccaaccacaatatccagcccttgcgcccgcagtcgctgggcttctgccagcatcgcccaggtcttcccgacgcctgcacaggcaccgaagaaaactttcagcttcccccgatgcggcgcggcagtttgttccagcagacgatcggggtcgggacgtaagggttcgttattcatcaagtttatccagcgccagattgagttcaacaatgttgacaaccggctggccgatatatttcaccagcggttgttggctgtattttgcgatcagttgcgtgagctgttcaacgctgagattacgcgctttcgccacgcgtgggatttgccaggccgccgcttgcggggtgatattattgtccagcccgcttgccgatgccgtcaccagttcaaccggaacgctcgcgctggcatccgggttagcggcccgtaatgcagcaacgcgtgcggctattagtttatccagctcagggttactgaccgccagattgctcccgccagaagcctgtggattatagggcatttctgccgttgccgacgggcgaccatgaaaatagccgttgccggtaaaattctgcccgattaatgccgaaccgcgcaccgtatcaccttcacgaatcaacgaaccattggcctgccagggaaaccaccattgccccagtacggtggtcagcagcgggtaaacgccgccagtaatcaataacagaaagataaatgttgataatgccggacgtaatccactcatggtaaacctcacaccagaccgcaaacggtcagcagtaaatcaatgactttgataccgataaacggcaccagcagcccacccagaccgtaaatccataagttacggcgcaacatggcagaagcggtaagcggtttataactcacgccttttaacgccaggggaatcaaaaagacgataatcaaggcgttgaaaatcaccgcactgaggattgcggagtcgggcgaatgcaggcacatgatgttcagcgcatttaactgcggatacgttgccgcgaatgccgccggaataatggcgaagtatttcgccacatcgttggcaatgctgaaggtggtcagcgagccacgggtcatcagcatctgtttgccaatgtgcaccacctcgatcaacttggtcgggttagagtcgagatcgaccatattgcccgcctctttcgccgcctgggtgccggagttcatcgccaccgcgacatctgcctgcgccagcgccggagcatcgttggtgccgtcgccggtcatcgctaccaaacgaccttccgcctgatactgacggatcaatgccagcttggcctccggtgtcgcttcggcgagaaaatcatcgacacccgcttccgcagcaatcgcggcggcagtcagacggttatcgccggtaatcatcaccgttttaatgcccattttgcgcagctgggcgaagcgctctttaataccgcctttgacgatatctttcagcgcaataacgcccagcacacgagaaccttccaccaccaccagcggcgtggctccctgacgcgcaacctgatcgactttttgatcaacatcggtagggaagtgaccaccgttagcctcaacatggcgacgaatggcatcgacagaacctttacggatcatgcggttgtcgatgttgatcccgctcatccggctttgcgcagtaaacggtacaaaggtggcatggagcgactgcacatcgcgctcgcgcaggttaaaacgctgcttggcgaggatcacaatactgcggccttccggcgtttcatcagccagcgaagccagttgtgcggcgtcagccagcgttttttcatccacgccctgcgcggggataaactccgacgcctgacggttaccgagtgtgatggtgccggttttatccagtagcagaacgtcaacgtcacctgccgcttcaactgcacgtccgctggtggcaatcacattcgcgcctagcatccggctcatcccggcgacgccgatcgctgacaacaggccgccaatagtggttgggatcagacagaccagcagcgccaccagtaccgttacgctgactgcattaccgccccacgcggaaaacggccacagcgtggcggttgccagtaaaaagacgatagtcagggcaatcagcagaatggtcagggcaatttcgttcggcgttttgcgtcgctgtgcgccttccaccatcgcgatcatccgatccagaaatgtctcgccggggttaacgctacactcaatcaccagccagtcagaaagaatacgcgtgccgccggtgacggaggcaaaatcgccgccggattcacggatcaccggtgccgattccccggtgatggcgctttcatcgaccgatgcacccccttcaataacttcaccatcgcaggggataatatcgccagcttctaccagtacgatatcgcctttacgaagttggtcggcaggaactttgtccgccgcagcgccatatttcggctcacgcagcttgcgggcaaaggcagtttttttcacccctttcagactgttggcctgcgctttactgcggccttctgccagcgcctcggcgaaattagcgaacagtacggtgatccacagccaaccgctaatggccgcgctaaacagcgcattgccgggcatcgcaccgcttgccatcgcgatgctaatacaggtggtcagcagactgccgatccagacgataaacatcaccggattgcgccattgcgcctgcgggtttaattttttcaccgcttctttcagcgcctgaacgacaagtgttggttcgaatagcgccagttgtttacgactcatattcagtgctcactcaatatcatcaggagagatattccgccaccggaccaagcgccagggcagggataaaggtcagtgcgccaaccagcaacacggtgccgattaacaggccaacaaacagcgggccgtgcgttggcagcgtgccggagctggcggcttggctctttttactcaccagcgaaccggcaattgccatcaccgggataatcaccccgaagcgaccgacaaacatgcagaacgccagtaaacagttccagaacggagagttggcgcttaatccggcaaaggcgctgccgttgttgttagcggcggatgacacggcgtacagcacttcgctaaaaccatgcgggccagggttgagcatggcgctacgtccggcgtcggtcatcatcgccaacgccgcgcccatcagcaccagcgtcggggtaaccagaattgccagtgcagtcagtttcatctcgcgtacgtcgatttttttacccagatattccggtgtacgaccaatcatcagcccggcaataaacaccgccagcaggacaaacagcatcatgccgtaaagaccagaaccgacaccgccgaacaccacttcaccaatttgcatcagccacatcggcaccatgccaccgagagcggtaaacgaatcatgcatcgcaatcaccgcgccacaggaagccgccgtcgtcacgaccgcaaacaggctactgaccagcacgccgaaacggctctctttaccttccatattgatgctgctgtccgtgcccagtgccagcagatgaggattaccctgaacttctgcccacatcaccacgcctacgcagatgacaaaaatcactgacatcgcccacagcaacatgcgcccctggcggcgatcgcccatcacttcaccaaaggcaaagcacagcgccgttgggatcaagaagatcgccagcatctgcacgaagttggtcagtgcggttgggttttcaaacggatgcgacgagttggcattaaagaagccaccgccgttagtaccgagcatcttgatcgcttcctgagaagctacaggccccatgggtaacagctgttgcgctccttcaacggtattcacagcctgataaggcagaaagttttgcagcgcaccttgttgaataaaaaacagtgcaatcaacaacgccacagggactagcacccataacgtgatgcgtagcagatcgacccaggcattcccgagcgtgctcatgctctggcgggtaaacgcacggatgagggcaaaaatcaccgcaatcccgctggcggcagaaagaaagttttgcaccgttaagcccgccatctggctgaaatagctcaacgtggtttcaccgctataagattgccagttggtattggtgacaaagctgacggcggtattcagcgccagatcccacgacagccctggcaactgctgtggattaagcggcagatagtgctgaccgagcaacataaaaaacagcaccgccagccccagcatgttcaggccgagaatggcacaaagatattgcttccagttcatctcacggtcagagacgccaagtgcgcgaaaaagtacgcgctcaacgcccgttgtaccgggaagaggaatgtcattaatcagccgcgccagcccgctgcctaaaggacgcgccagcaccattaacaccagtaaaaacgtggcgatcagtaagaacccttgcgcagccatcagaacgcctccgcattgatcagggcataaaccagataacccagtaataaaaacaccagcaatacgccggttatcacgcctgcactcacagtgcacctccagtggcctaaaagtgataccggaagggtagaattctggctgcaaagatttcgcaaaaatctgcgggcggggtgtaaaaaaagtataaaaatggcaaaagccatgatttaactaatgtttagtattaatttaacttttgtgtaacttaattacaggatgaatgtaaataaaccatcaataagcaaaaataagtggtcggatgagtagtaaaattacacaaaaggcggtactattttcatcagataaacaaattcatttttccggtgccattcaccgggtagatacaaaagggggagaaaagtatggaactctacagagaatatcctgcatggcttatctttttacgccgtacttatgcggttgcagcgggcgttctggcgctgcctttcatgcttttctggaaagaccgcgcccgcttttacagctacctgcatcgcgtctggtcgaaaaccagcgataaaccggtgtggatggatcaggccgaaaaggcaactggtgatttttattgattgctgagttttgaatacattgaaaaccgccagcggaaacgctggcggttttttgtatcaggaagatgttcagaggaatatttagacatcgttataccaatcgaaacatatattcatgaaatatatataaatattttcctaattgttcttatctgacagatatctcacttaaggctttcttataaatctgtagggtttcgcctgtcagcagacaaataacccgataaaacaaggatgagcagatgagcggaaaaccggcggcgcgtcagggcgacatgacgcagtatggcggtagcattgtccagggttcagccggggtacgcatcggtgcccccaccggcgtggcctgttcggtgtgccccggcggggtgacgtccggccatccggtcaatccgctgctcggtgcaaaggtccttcccggtgaaaccgacatcgccctgcccggcccgctgccgttcattctctcccgcacctacagcagttaccggacaaaaacgcccgcgccggtggggagcctcggccccggctggaaaatgcctgcggatatccgcttacagctgcgcgataacacactgatactcagtgataacggcggcagaagcctgtattttgagcacctgtttcccggtgaggacggttacagccgcagcgagtcactgtggctggtgcgcggcggcgtggcgaaactggatgaaggtcaccggctggccgcactctggcaggcgctgccggaagaactccgcttaagtccgcatcgttatctggcgacaaacagtccgcaggggccgtggtggctgctcggctggtgtgagcgggtgccggaagcggatgaggtgctgcctgcgccgctgccgccgtaccgggtactgaccgggctggtggaccgcttcgggcgcacacagacgttccaccgcgaagccgccggtgaattcagcggcgaaatcaccggcgtgacggatggtgccgggcgtcacttccggctggtactgaccacgcaggcgcagcgggcagaagaagcccggcagcaggccatttccggcgggacggaaccgtccgcttttcctgataccctgccgggttacaccgaatatggccgggacaacggcatccgtctgtctgccgtgtggctgacgcacgacccggaatacccggagaatttacctgccgcgccgctggtgcgctatggctggacgccccgcggcgaactggcggcggtgtatgaccgcagcaatacacaggtgcgcagctttacttacgatgataaataccggggccggatggtggcgcaccgtcacacgggccgaccggaaatctgttaccgttacgacagcgacgggcgggtgacagaacagctaaacccggcaggcttaagttacacgtatcagtatgagaaggaccgcatcaccatcaccgacagcctgaaccgccgtgaagtcctgcacacgcagggtgaaggcgggctgaagcgggtggtgaaaaaggaacacgcggacggcagcgtcacgcagagtcagtttgacgcggtgggcaggctcagggcacagacggatgccgcaggcaggacaacagaatacagtccggatgtggtgacgggcctcatcacgcgcatcaccacgccggatggcagggcatcggcgttttactataaccaccacagccagttaacgtcagccaccgggcctgacgggctggaaatacgccgggaatatgatgaatggggccgtctgattcaggaaactgcccctgacggcgatatcacccgctaccgttatgataatccacacagtgacttaccctgcgcaacggaagatgccaccggcagccggaaaaccatgacgtggagccgttacggtcagttgctgagcttcactgactgttccggttatgtaacccgctatgaccatgaccgttttggtcaggtgacggcggtgcaccgcgaggaagggctgagtcagtaccgcgcatacgacagccgtggacagttaattgccgtgaaagacacgcagggccatgaaacgcggtatgaatacaacgccgccggtgacctgaccaccgtcattgccccggacggcagcagaaacgggacacagtacgatgcgtggggaaaagccatctgtaccacgcagggcggtctgacgcgcagtatggaatacgatgctgccggacgggtcatccgcctgaccagtgaaaacggcagccacaccaccttccgttacgatgtactcgaccggctgatacaggaaaccggctttgacggccgcacacagcgttatcaccacgacctgaccggcaaacttatccgcagcgaggatgaggggctggtcacccactggcactatgacgaagcagaccgcctcacgcaccgcaccgtgaatggcgaaaccgcagagcggtggcagtatgacgaacgcggctggctgacagacatcagccatatcagcgaagggcaccgggtgacggtgcactatggttatgacagtaaaggccgcctcgccagtgaacacctgacggtgcatcatccgcagacgaatgaactgctctggcagcatgagaccagacatgcgtacaacgcacagggactggcgaaccgctgtataccggacagcctgcccgccgtggaatggctgacctacggcagcggctggctgtcaggcatgaaactcggcgacacaccgctggtggagtacacccgcgaccgcctgcaccgggaaacgctgcgcagcttcggccgttatgaactcaccaccgcttatacccctgccgggcagttacagagccagcacctgaacagcctgctgtctgaccgcgattacacctggaacgacaacggcgaactcatccgcatcagcagcccgcgccagacccggagttacagctacagcaccaccggcaggctgaccggcgttcacaccaccgcagcgaatctggatatccgcatcccgtataccacagacccggcaggtaaccgcctgcccgacccggagctgcacccggacagcgccctcagcatgtggccggataaccgtatcgcccgtgacgcgcactatctttaccggtatgaccgtcacggcaggctgacagagaaaaccgacctcatcccggaaggggttatccgcacggatgatgagcgcacccaccggtaccattacgacagtcagcaccggctggtgcactacacgcggacacaatatgcagagccgctggtcgaaagtcgctatctttacgacccgctgggccgcagggtggcaaaacgggtatggcggcgtgaacgggacctgacgggctggatgtcgctgtcacggaaaccgcaagtgacctggtacggctgggacggcgaccgcctgaccacgatacagaacgacagaacccgcatccagacgatttatcagccggggagcttcacgccactcatcagggttgaaaccgccaccggtgagctggcgaaaacgcagcgccgcagcctggcggatacccttcagcagtccggtggcgaagacggtggcagtgtggtgttcccgccggtgctggtgcagatgctcgaccggctggaaagtgaaatcctggctgaccgggtgagtgaggaaagccgccgctggctggcatcgtgcggcctgacggtggcgcagatgcaaagccagatggacccggtatacacgccggcgcgaaaaattcacctgtaccactgcgaccatcgcggcctgccgctggcccttatcagcacggaagggacaacagcgtggtacgcagaatacgatgaatggggtaacctgctgaatgaagagaacccgcatcagctgcagcagcttatccgcctgccggggcagcagtatgatgaggagtccggcctgtattacaaccgccaccgctattatgacccgctgcaggggcgatatatcactcaggatccgattgggctgaaagggggatggaatttttatcagtatccgttgaatccgatctcaaatatagatccattaggattagaaacactaaaatgcattaagccactgcattcaatgggcggaactggtgaaagaagcggtccagatatatgggggaatccgttctatcatcaatatctttgtgtcccagatggtaaaggggactatacttgtggtggccaagaccaacggggagaatcaaaaggagatggtctatgggggccaggtaaagcaagtaatgatacaaaagaagctgctggccgttgtgacctcgttgaaaccgataatagttgtgtggagaactgtttaaaagggaagtttaaagaggtaaggccgcgttattctgtattgcctgatatattcacacctataaatttagggctatttaaaaactgccaagactggtctaatgattctttagaaacatgtaagatgaagtgctccggaaataacattggacgttttattagatttgtattcaccggagtgatgtaatgaaatatattatttttttattcagagctatatggctggctttatcgcttttaatactattcttttccatgcatagactttcactattagactccactcgtgatgtgagcgagttaattagtctcatgtcttatggaatgatggtaatatgttttccaacaggcatagtattctttattgctctaatatttatagggactgtatcagacattattggcgtaaggattgatagtaagtatattatggcgataataatatggctttattttctgtcaggagggtatattcaatggtttgtattaagtaagcgcattataaacaaataaattaagttaattgctcttattattatatgtaacctgggcattgatatcccgtatgccacagacccggcaggtaaccgcctgcccgacccggagctgcacccggacagcaccctcagcatgtggccggataaccgtatcgcccgtgacgcgcactatctttaccggtatgaccgtcacggcaggctgacggagaaaaccgacctcatcccggaaggggttatccgcacggatgatgagcgcacccaccggtaccattacgacagtcagcaccggctggtgcactacacgcggacacaatatgcagagccgctggtcgaaagccgctatctttacgacccgctgggccgcagggtggcaaaacgggtgtggcgacgtgaacgggacctgacgggctggatgtcgctgtcacggaaaccgcaagtgacctggtacggctgggacggcgaccgcctgaccacgatacagaacgacagaacccgcatccagacgatttatcagccggggagcttcacgccactcatcagggttgaaaccgccaccggtgagctggcgaaaacgcagcgccgcagcctggcggatacccttcagcagtccggcggcgaagacggtggcagtgtggtgttcccgccggtgctggtgcagatgctcgaccggctggaaagtgaaatcctggctgaccgggtgagtgaggaaagccgccgctggctggcatcgtgcggcctgacggtggagcagatgcaaaaccagatggacccggtgtacacgccggcgcgaaaaatccacctgtaccactgcgaccatcgcggcctgccgctggcgcttgtcagcacggaaggggcaacagaatggtgcgcagaatacgatgaatggggcaacctgctgaatgaagagaacccgcatcagctgcagcagcttatccgcctgccggggcagcagtatgatgaggagtccggcctgtattacaaccgccaccgctattatgacccgctgcaggggaggtatatcactcaggatccgattgggctgaaggggggatggaatttttatcagtatccgctgaatccggttcagtatatagattcaatgggactggcatcaaaatatggacacttaaataatggcggatatggagcgagacccaacaaaccgcctacgcccgatccaagtaaattgccggacatagcgaaacaattaagactgccatatcctattgaccaggccagtagtgcgcctaatgttttcaaaacattcttcagagcattaagcccttacgactacacactgtattgcaggaagtgggtaaaaccaaatctgacttgtacgccacaggatgattcccagtatccagggatggatacaaagacagcaagtgattacctgccacagacaaattggccaacaactcaattaccaccaggatatacttgtgcagaaccctatttattcccagacattaataaacccgatgggccagcaacagcagggatagatgatttgggtgaaattttagctaagatgaaacagagaacatcgagaggaataagaaaatgaaaagagttttgttctttttgctgatgatatttgttagttttggtgttatagctgattgcgaaatacaagctaaagatcatgattgttttactattttcgctaagggtactattttttccgcgtttcctgtcttaaataataaagccatgtggagatggtatcagaatgaggacatcggtgagtattattggcaaacagaactgggtacatgtaaaaataataaattcacaccaagcggggcgagactcttaattcgcgtcgggtcactacgccttaatgaaaatcatgccatcaaaggaacgttgcaggagttgataaatacagcagaaaaaacggcgtttctcggcgatcggtttagaagttatataagagcgggtatctatcaaaaaaagagcagtgatccagttcagttgttggcagtccttgataattcaatcatggtaaaatattttaaagatgagaaaccaacttatgctcgaatgacagcacatctcccgaacaaaaatgagtcttacgaatgtttaataaagatacagcatgaactaattcgtagtgaagagaaataaaatctcttcctgagaaaacaaattaatcattgtgaaaaattatataactcatggaataggtgtttattttgcgttccatttgcagggaaagatcacgtaacgctacttttttgtactaaataattcgaattttaagttcaacaattgagatactacttattgtctaaagctgtttttcatagcttatacatgatcaaatactccttacataaataaggtgaacaaatggaacttaaaaaattgatggaacatatttctattacacccgattacagacaagcctggaaagtggtgcataaattgtcagatattctactgttgactatttgtgccgttatttctggtgcagaaggttgggaagatatagaggatttcggggaaacacatctcgattttttgaagcaatatggtgattttgaaaatggtattcctgttcacgataccattgccagagttgtatcccagggaaagatcacgtaacgctacttttttgtactaaataattcgcattttatgtttaaaaattgagatattccttattacctaaagctgtttttcatagcttatacatgatcaaatactccttacataaataaggtgaacaaatggaacttaaaaaattgatggaacatatttctattattcccgattacagataagcctggaaagtagagcataaattgtcaggcatcctactattgactatttttgccgttatttctggtgcagaaagttgggaagatatagaggatttcggggaaacacatctcgatttcttgaagcaatatggtgattttgaaaatggtattcctgttcacgatactattgccagagttgtatcctgtatcagtcctgcaaaatttcacgagtgctttattaactggatgcgtgattgccattcatcaaatgataaagacgtcattgcaattgatggaaaaacgctccggcactcttatgacaagagtcgccgcaggggagcgattcatgtcattagtgcgttctcaacaatgcacagtctggtcatcgggcagatcaagacggataagaaatccaatgagatcacagctatccctgaacttcttaacatgctggatattaaaggaaaaatcatcacaactgatgcgatgggttgccagaaagatattgcagagaagatacaaaaacagggaggtgattatttattcgctgtaaaaggaaaccaggggcggcttaataaagcctttgaggaaaaatttccgctgaaagaattaaataatccagagcatgacagttacgcaatgagtgaaaagagtcacggcagagaagaaatccgtcttcatattgtttgcgatgtccctgatgaacttattgatttcacgtttgaatggaaaggactgaagaaattatgcgtggcagtctcctttcggtcaataatagcagaacaaaagaaagagccagaaatgacggtcagatattatatcagttctgctgatttaaccgcagaaaagttcgccacagcaatccgaaaccactggcacgtggagaataagctgcactggcgtctggacgtggtaatgaatgaagacgactgcaaaataagaagaggaaacgccgcagaattattttcagggatacggcacatcgctattaatattttaacgaatgataaggtattcaaggcagggttaagacgtaagatgcgaaaagcagccatggatagaaactatctcgcgtcagtccttgcggggagcgggctttcgtaatctttccctgctttttgtactaaataattcgcattttatgtttaaaaattgagatattccttattacctgaagctgttttttattgcttatacatgatcaaatacttcttacataattaaggagaacaaaatggaacttaaaaaattgatggaacatatttctattatccccgattacagacaagcctggaaagtggaacataaattatcggatattctactgttgactatttgtgccgttatttctggtgcagaaggctgggaagatatagaggattttggggaaacacatcccgattttttgaagcaatatggtgattttgaaaatggtattcctgttcacgataccattgccagagttgtatcctgtatctgtcctgcgaaatttcatgagagctttattaactggatgcttgactaccattcttcagatgataaagacgtcatcgcaattgatggaaaaatacaccggcattcttatgacaagagtcgccgtaagggagcgattcatgtcattagtgcgttctcaacaatgcacagtctggtcatcggacagatcaagacggataagaaatccaatgagatcacagctatccctgaacttcttaacatgctggatattaaaggaaaaatcatcaaaaccgatgcgatgggttgccagaaagatattgcagagaagatacaaaaacagggaggtgattatttattcgctgtaaaaggaaaccaggggcggctaaataaagccttcgaggaaaaatttccgctgaaagaattaaataatcccaagcatgacagttacgcaattagtgaaaagagtcacggcagagaagaaacccgtcttcatattgtttgcgatgtccctgatgagcttattgatttcacgtttgaatagaaagggcagctatggttagaaactacctgacgtcagtccttgcggggagcaggctttcgtaaatttgtcctgctacaacaggattaacttcacaaatatcatttctcaacgtctacacttactcctgtaaaccgctcaggagcagtaatgaatctacaacgatttgatgacagcaccctaatccgtatctttgcccttcatgagttacatcgactgaaagaacatggcttaacgcgcggggcgcttctcgattatcacagccgctataaactcgtctttctggcgcattctcagccggagtaccgcaaacttggcccgttcgtggctgatattcaccagtggcaaaatctggatgactattacaaccagtaccgccaacgcgtagttgttttgctttctcaccccgccaacccgcgcgatcacaccaatgttttgatgcacgttcagggttattttcgcccgcatattgattccacagaacgccagcagctggctgcgcttatcgacagttatcgccgtggcgagcaaccacttcttgcgccgctgatgcgtatcaaacactatatggcgctttatcctgacgcctggctttcagggcagcgttatttcgaactttggccgcgtgtgattaacttgcgccattcaggagttttatgactacccatctggtctggtttcgccaggatttacgtctgcacgataatctcgcactggctgccgcctgccgcaattcgtctgcacgcgtgctggcgttgtatatcgctacaccacgccagtgggcgacgcataacatgtcgccgcgtcaggctgaacttatcaatgctcaactgaatgggctacaaatagcgcttgcggaaaaaggtattcctttattgttccgtgaagtggatgactttgtcgccagtgtcgaaatagttaaacaggtgtgcgcggaaaacagcgttacccacctgttttataactatcagtatgaagtgaatgagcgggcgcgggatgtggaagttgaaagagcgctgcgtaacgtggtgtgtgaaggatttgatgacagcgtgatcctgccgcctggcgcggtgatgaccggtaatcacgagatgtacaaagtctttacgccttttaagaatgcctggctgaaacggctgcgggaagggatgccggagtgcgtcgctgcgccaaaagttcgtagtagcggatcgatagagccctcgccatccattacgctgaattatcctcgtcagtctttcgatactgcgcattttccggtggaagaaaaagcggcgattgcgcaattacgccagttttgccagaacggtgccggagaatatgagcaacaacgagattttccggcagtggaaggcaccagccgtttgtcggccagcctggcaacgggcgggttatcgcctcgccagtgcttgcatcgcttgttggctgaacagccgcaggcgctggacggtggggccggtagtgtctggcttaatgagctgatctggcgcgagttttaccgtcacctgataacgtatcacccctcgttgtgtaaacatcgtccatttattgcctggacggatcgtgtacagtggcagagcaatcccgcacatttacaggcctggcaggaaggcaaaacgggatacccgattgttgatgccgctatgcgtcagcttaacagcactggctggatgcataacaggctacggatgattacagccagttttctggtgaaagatttattgatcgactggcgcgaaggcgagcgatatttcatgtcgcagctgattgatggtgatttggcagccaataacggtggctggcagtgggccgcttcaaccggaaccgatgcagcgccgtattttcgtattttcaacccgacaacccagggcgagaaatttgatcatgagggcgagtttatccgccagtggctaccggaactgcgcgatgtgccagggaaagtggtgcatgagccgtggaagtgggcgcagaaagcaggtgtgacgctggattatccgcaaccgatagtcgagcacaaagaagcgagagtacaaacgttggcagcgtatgaggcggcgcggaaggggaaataacagacgcgtcaggcaatcgagcccagatgccggatgcggcgtgaacgccttatccagcctacaaatttgtgcaaattcaataaattgcaggaaatacgtaggcctgataagacgcgtcaagcgtcgcatcaggcatcggtgctggcctattaagactccagcgccagcgcgcggtttctgaatttcagcgcctgatacagccaaatcatcagtaccagtcctacacacgccagtgcgccccaggtaatttgatcaaatacttcaatatatgcattgatggagtagttgatcgccccggaagcatcaaacgaagcctgcgatgtctgatcggcaatcacgcccgccagatagttcgcgatcgcgccagaaagcagcatgtagatgccggttaatacgccggtcacaccggggatttcaatgcgcgtaatttgcgacatggcaaccgggtcgataaacagttccgcaaagcccatcaccgccaggcctaataccatcagtggcagagaagagtgaccatacattgcggaccagcgggcgcttaaggtcagaatgcagaatccggcgctcatcaggccaaggccaagagcaaatttcccccagatgcgcacggtacgattacccgcgacactctcttttaccacccacgccaggaacacaccgcacagcataactgcgaaggcattaatcgactggaacatcgcggtcggaacggtataaccaaacatatcgcggttaacgaagcggtcgatataaaggctaatcgagctaccgccctgttgtgcgaaggcccagaacaacatactgaagaaggtgagcgtcacaatcagccccagctccttccgctgtttctggttttctgctttgcgataaatttttgccagtacacccaggccaataatagtcgcgacaattaaggcgtataccgaccactctttccagaacagtatggtaatcagtgcaggcgttgccaccagcagaaccagcagccatccccagttcggcaggagaaagtttgtcgcacgcagtacttttttgttaacgccgcgggtatgagtgaaatgacgattgccacataagaaaatgaccagacccgcgatcatgccaaccgccgccaggccaaagcccatcgcccagctgtactcttcctgggcgtaaccacaggcgataggtgcgataatagaccccacgttacccgccgcatacatcagcgagaaaccgccatcacgacgcggatcggttggctcatacagctcgccgagcagacagcttacgttagatttaaacaggccatagccgcagacgataatcgccagggacagatagaggaatgacggatggatctcactggcacccagcaccacatgaccgatcgccatcaacaacgcccccagcatcaccgccatgcgattgccgagaactttatccgccaaaaagccaccgaggattggcgtgacatacaccagcgaacagtaggcgctaaataactcgtaggcgtgagtatcgttgtattttagttgattggtgagatagagaatcagcagggcacgcatgccgtaaaagctaaaatattcccagatttgcagcgcaacgacatagtaaatagcgcgcggctgtgatgcgtgtttattcataataattccacaattgacggcaacgtcacgtaatagttgcgcggcgtgcttgtgtttccttaaagttaaaactttgatacagatctgattatttatgcaatatgctgtctgattgcataaatatacattagctgaagcgtgatgatataaacaatttgcgtcttttggcgtcgggtttgtttcttaatatgtcaaaagattggctatcgacgaactggcgaggtaacgctatgttaacggtgtagctatcagaatacggaaggcgcgaagatgaaaaacaccgaactggaacaactgattaacgaaaaactgaacagcgcggcgattagtgattacgcgccgaatggtttgcaggtggaaggcaaagagacggtgcaaaaaattgttaccggtgtcaccgccagccaggctttgctcgatgaggcagtgcgtctgggcgcggatgcggtcattgtgcatcatggctacttctggaaaggagagtctccggtcattcgcggaatgaagcgtaaccgtttaaaaacgttgctggcgaatgatatcaacctgtatggctggcatttgccgcttgacgcacatcctgagctgggcaataacgcacagctggcggcgttactggggatcacggtcatgggcgaaattgagccgttggtgccgtggggcgaactgaccatgcctgtgccgggactggagctggcttcctggattgaagcgcgtctgggacgtaagccgttatggtgtggcgataccggacctgaggtggtccagcgcgtcgcctggtgcacgggcggcgggcaaagttttatcgatagcgccgcgcgttttggcgtggatgcttttattactggcgaagtttctgaacagaccattcattcagcccgcgagcagggattgcatttttatgctgcaggtcaccatgccactgaacgtggtggtattcgcgcattgagcgagtggctgaatgaaaataccgatcttgatgtgacctttattgatattcctaatcctgcataacgaataatcagagggatcgaaagtgcaacgagcgcgttgttatctgataggtgaaacggcggtagtgctggaactggaaccgccggtgacgctggctagccagaaacggatctggcgactggcgcagcgtctggtggatatgccgaatgtggttgaagccattcccggcatgaacaatatcacggtgattttgcgtaatcctgagtcgctggcgctggatgccatagagcgtttgcaacgctggtgggaggagagcgaggcgctggagccggagtctcgctttattgaaattccggtggtttacggtggtgcaggcggaccggatttggcggtggtcgcggcgcattgcgggttgagcgaaaaacaggttgttgaattgcactcctccgtggaatacgtggtctggtttttaggttttcaaccgggcttcccgtatctcgggagtttgccggaacaactacacacgccacggcgcgctgaaccgcgcttactcgttccggcaggttctgtcgggatcggcgggccgcagactggtgtttatccgctggcaacgccgggtggctggcagttgattggtcatacctcactcagcctgtttgatccggcgcgtgacgaacccatcttattacgtccgggagacagcgtgcgctttgtaccgcagaaggagggagtatgctgaagattattcgtgcgggcatgtataccactgtgcaggatggcggtcgtcacggttttcgccagtcgggtatcagccactgcggcgcactggatatgcccgcgttacgcattgctaacctactggtgggtaatgacgccaatgcccccgcgctggagatcacgctcggtcagttaactgttgagttcgaaactgatgggtggtttgctctgacgggtgccggttgcgaagcgcggctggatgataatgccgtctggaccggctggcgattgccgatgaaagcaggccagcgtttaacgcttaaacgcccgcagcacgggatgcgcagttatctggcggtcgcgggtggtattgatgttccgccggtaatgggctcatgcagcaccgatctcaaagtggggattggcgggctggaaggccgtttactgaaggatggtgaccgactcccgattggcaaatcgaagcgtgattctatggaagcgcagggcgttaaacagctgctgtggggcaaccgcattcgcgccttgccggggccggaatatcatgagttcgatcgcgcctcgcaggatgcattctggcgttcgccctggcagcttagctcgcaaagtaaccgcatgggctatcgcttacaggggcaaattttaaaacgcaccaccgatcgcgaactgttatctcacggtttgttaccgggcgtggtgcaggtgccacataacgggcagccgattgtgttgatgaacgacgcacagaccaccggtggttacccgcgtattgcctgtatcattgaggctgatatgtaccatctggcgcaaattccgctcggtcagccgattcattttgtccagtgttcactggaagaggcactaaaagcacggcaagatcagcaacgttattttgaacaattagcgtggcggctgcacaatgaaaattgacctgaacgccgatctgggcgaaggctgcgccagcgacgcagagctattaacgctggtttcctctgccaatattgcctgtggatttcatgcaggcgatgcgcaaatcatgcaggcttgcgtgcgtgaagcaataaaaaatggtgtcgcgattggcgctcacccgagttttcccgacagggaaaattttggtcgcagcgccatgcagctgccgccagaaaccgtttacgcccagacgctgtatcaaattggcgcgctggcaacgattgcccgtgcgcaaggcggcgtaatgcgtcatgtcaaaccgcacggcatgttgtacaaccaggcggcgaaagaagcacaactggcagacgccatcgccagagcggtatacgcttgcgatccagcattgattctcgtcgggctggcgggaagcgagctgattcgtgcaggcaagcaatatggtctgacaacgcgcgaggaagtgtttgccgatcgcggttatcaggctgacggctcgctggtgccgcgaagccagtcaggcgcgttgattgaaaacgaagaacaggcgctggcgcaaacgctggagatggtgcaacacggcagagtcaaaagtatcaccggcgaatgggcaacggtcgcggcgcaaacggtctgcctgcatggcgacggcgagcacgcactggcgttcgcccgccgactacgctctgcatttgccgaaaaggggattgttgtcgcagcataaccccgattaataaagaatgaaaaaaggatatcaccatgcctgaaggcccggagatccgccgtgcagcggataacctggaggcggcgatcaaaggcaaaccactaactgatgtctggtttgccttcccgcagttaaaaccttatcaatcacaacttatcggtcaacacgttacccatgtggaaacgcgtggtaaggcgttgttaactcatttttccaacgacttaacgctctacagccataatcagctttacggcgtctggcgcgtggttgataccggcgaagagccgcagaccacgcgagtattgcgggtaaaactgcaaacggctgacaaaaccattctgctttatagcgcctcggatattgagatgttgaccccggaacaactgaccacgcatccgtttttacaacgcgttggtcccgatgtgctggatccgaatctgacgccggaggtggtgaaagaacgattattgtcgccgcgctttcgtaaccgtcagtttgctggattactgctcgatcaggcgtttctggctgggcttggcaattatttgcgggtggagatcctctggcaggttgggttgactggaaatcataaagcgaaagatctcaatgcggcgcaactggatgcactcgcacacgcgttactggagattcctcgattttcctacgctacgcgggggcaggtggatgagaataagcatcatggggcgctgtttcgctttaaggtttttcatcgagatggcgaaccgtgcgaacgttgtggcagcatcattgagaaaaccacgctgtcatctcgcccgttttactggtgccctggctgccagcactaggccgaccgcttcggcgcataggttgaaataaaccgcgcaatggcaggccctgtcagcaaaatactgaacaggcgtagggtttgcatcgccataatgagcgccatatcggcattgctccctgcggcgatgaccgccacggtatcaagcccgccggggctggtggcgaggtaggcagtcataaaatcaatgtgcataaaccgggtcagcccccacgccatacccgcacaaatagccagcagagcaaaaatcgacagcaggatttgcggtagcgggcgtagtgcccgcagtaagatttgtttatcgaaaccaagaccaatccgccagccaattgccatatacgccatcgccagcagccattccggtagttcgatggtgatgagctgaccagactggagcactgcgcccgccagcatcgggatgagcatcgtgccggaaggaagacgcagcaggcatcccactgtaccggcaacgaccgcgagcaaaatagtaagcaggagattaatgctcactggcgggaaccagacgatatgctggttaaccgcttcagcgttatcgcccagcatcatgcgggtgaccagaacagcggcccccgcgacgaacagcactcgcagatattgcataaacgccaccaggcgaatatctgcgccgtaatcttgcgccatagcgaccattgccgccgcgccgccaggagaggagccccaggcaccggtatttccaggcaatgagctatagcgcaccaataaccaacccacaatggcgctggaaagcagcgttaccagtaaaattgcaagcacgatcggccagttgacggccagggtggtgagaatcgaaccagtgaggttttgcgcaatcatgcagccaagaatggcctgggcggcgagaaaagcagagcggggaagttgcagagtaattccgcgcatactaaagatgatcccggcgatcatcggcccaagtaatagcgccgccgggagatgtaccgcgaggaaaccaatagaaaggagaagtgatagcacacataacattccccactgcaaaactggcatccttcgctccctcattattttctctttggtgtatcgatacagcataaagaaagctgggccaggaaaaaataacagcaatcaaggaaaaggggaaaatcagcaattttctgaaagagatgccctttccggcggcaaagggcatcatggtaaatcagttatagttaatcttaaaaagcaccactgtatcgaaggggccagcctcgatgggggtgcctggaatggacgaaagttcagccgtataggttttttcgtagaccaacatgtcactggtgaaatcggcgtattcagcatatttattgaaggtataaggcgaggcgttttcatccagtaaacgtagcttcagaccattaccaatcaacaatgctttatcttcttcaaccaacgtttcttcggtataaaaggaggaactgactttaaatccgtcggtgcattgatcgttttggctcttggtcgttttaatactgaacgttttcgacattgtgtggcgacgtatatccagcaaattaaatttaccaaaatcaatcacctgtgtttccggtgaaatggaaaaattgacgctgcaatccagcacgcgaatgttttccagaccagtaatatgatatttcaggttttgggcagtagggtcttcgttaacgctaccggcaccgtcaaattgcacgacgatatagtcgctaagcgtactttgataatcatgcggcggcatttctcgtattttgacgtataaccgcatgcgagcgagaaaggtacgcgacatatgaatattagcgggatcgcccgagcaaattttgttctgccatcccatcgcgatgatctgctcaggggtataaatatcaatgttcttactgtcgatacactggttagtgtcgatgcgactttttcccagactggcatcgtaatcgacaccgttgtatgtcacgccgagttgataataacgatcctgcacccccggataggggtttacccaggcgtagacatgctcgctttcaaagttgccgttggtattgttgtcacaatagacgggaattttaatatcgtcagattcccagatcttatcaccgggtttggcattgcctggtacagcaaacggttgaatcgcttctgatttttctactgcgccaccagatgtaccaaaatagcagttcagcgccattgcagacttcaacggcagaaataacaggcagatgacgagcaacaatcccttgccagcactcatttcgcctccactgcttgtaaacggcattgtccgctgcagttgagcgtcgtcatgcgtaatgcgccgtaatcatccatgtaaccgagataaaactggctgccgctataacttccggtgtttgtgttgaccgtactaaaaggtgcaaccatcacggttttgaagcctgggagaacgcctttttcatttctccccagataggcaatggtcagataatacgcggtaggatttttcagtgtcagttggttgccctgctggctgacctgtaactgcagttcgaccttttctcctgctttcttgcgtaatgcagccggtcgccagaacaatttaatacgactttgaatagcgacctgaagtatcgcatggtcgctgcttttatccggagcgggaggaatttcgcgcatattgtagaaaaatagcgtttcgcgatcgccaggtaattgtgtggttgaggcttgtttcacaacccgcacctgcgatgtcgctttcggttccagacgttgaatagggggcaaagcgaccagaagagcatcgcttttctcccctttttcattttctatccaggaataagcaagataaggcagtttgtcactttggttttcgatacgcaggctggtggctttgtcattggcgttaaacacaatgcgtgtgcgatcgggttgcaccgcagcattgcaacccaagctgatggttaacaacattaagggtaatcctttaataaatgtcattctcttttccttaattaatgacaaggtaaaatcaggcgtttggtcgtgtcttccagacgttctggcagatgaataatgcagctttgctcaccccagaccacggtaaacagttgattttcagcgacaccgcttaaccaggcatgtccttcctcgccaaccatacccacgctaatgccgctgtcatcctggcggatatccgcaccgaggggagggaactgaccgctggcgttgcgtatgatgacgttaacgtctttaccggaacgggaagccagtgatttgtaacctatcgcgccttcaatccatgtttccttgatgacgttttctgcaactgttacgccgtcgggtaagtcattcatgttcaccgccacggtggaaggctggtaactggaaatcaacggcaccaccgcaatgccaaaatggttggtgtagtcgagattgccctgaaccggaatatctgccacgccatcggtgctgaccatcaggcgtggttcattggtggagctgcggcgatgaaatgctgcaccatattgggttgcggtgaaagaaccgctccagctgctgctgacggaactgtaatcactggcggcataggtaccagaaatatcccactcacccgctgaactcaggtgctgatagttaccgctcacctgggctccattgtccggacgatcggattgcagtccggcagacatgccccagctattacgttcatccagcgtatcgttccacgacatgcggtgtatggtgctgtggctactgttttgcatgtcatagccaacccgaccaccgttaccgaaggggagcgaaatcgacagataaatctggttgtcgcgatctttatcttcgtagtgggtcgtattgaatgacgtcgaaatcgagatatctctccagtcaccaatatcaacattaaaacctgctgtgatgttggcggtcgtggaggcgtctgcattccaccaggtttgatgtagcaggttggcgtaaagattgaggtttagtggggtaatcggttggcccacggataagctgatcgtctgtttttcgtcctgcgcatcgctgtcgttgtatttgtgatccagatagttggcgtagctgtgaaaatgacgatctgagaagcgataagcggcgagcgaaatcgtgctgttggtggcatccacttgtttgctgtaattaaaacggtagcttaagccccgctcgtcctgctgagtatcaaaatggctactggcccaggtgacatcaaaggacagtgcgccaagccacagcatattttgcccgatacccattgcggcagaatggtagtcatcatcagaaatcagcaggccgccgtacagcgaggtgtttgagagcatcccccaggaaacttcattgctaaaaaaggtttcattttcagtttgatgtgacatggaaggccgtggctgacccgcggccaatttatagcgaacctgtccctggcgagtcaggaagggcgtcgatgctgccgaaacctggaaattgttcacccgaccatcttcttccgtcactttgacatccagcgtgccctgaacagactgattgaggtcatcaataataaacgggcctggcgggacttttttctggtaaatgacgcggcctgattgactgatcgtcaccgtggcattggtctgtgcaataccgctaatttgtggggcgtagccacgcagctcccacggtaacattcgatcgtcactcgccagtgccgcgccggtataagaaaaaccatcgaaaatattggaactgaaatcggtttcgccgagggttaacttagagcctaattgcggtaatggacgaaaaagataggtgcgcgatattccgcctgactggtcatggttatcttcgctatcggtcttattaagctggtaatcactgcgtaagcgccatgccccggcgttaattccggcggtaccgtaggcattcaggttagtgctgctgctgccgtcctgtgggcggtagctgctggcaaacaagttgtaatccatcaggacaccggcaacaccttctttccatgtagaggggggagcccagttttctgagtgccacgccagccaggcttgcggaatactaatattcagttgctgattggcttgatcgaaattgaagagcatttcaggtcgggaactgaaatcaatacaccgatctatctgtggcaaggactgacggatatctggttttaaaccaaatttatcgaccagtgaatcattgatgcatggaatggttttgtcaccctttttttgccagttaattttttgcccattactgattttgttgttattcaccgcaacgctaacaaaatattcaccgggagcaatgactcctttttcctttaataatgaaatatcaatgcggtcgcgcattgatttatcgagaacattcagattgaattcgaccgccattgcgcaaggcatcgccatgaccaggcaggatacaaaagagagtcgataaatattcacggtgtccatacctgataaatattttatgaaaggcggcgatgatgccgccaaaataatacttatttataatccagcacgtaggttgcgttagcggttacttcacctgccgtgacatcgactgcattatcaatttgttccatccaggcgaaaaagttcagcgtctgttctgatgagcttgcatccaggtcaagatctggcgcggctgaacctaatacgatgttaccgtcatttttgtccatcagtcgtacaccgaccccagttgcttcgcctgcactggtgttgctcaacaaaggcgtagcaccagttgtcttagccgtgctatcgaaggttacgccaactttggataccggcattccgctaccgttgtcagaagcaggcagatcacagttgatcaagcgaatgtcgacggccactttattgctatgatgctcccggtttatatgggttgtcgtgacttgtccaagatctatgtttttatcaatatcttctggatgaatttcacaaggtgcttcaataacctcccccttaaagtgaatttcgccagaaccttcatcagcagcataaacaggtgcagtgaacagcagagatacggccagtgcggccaatgttttttgtcctttaaacataacagagtcctttaaggatatagaataggggtatagctacgccagaatatcgtatttgattattgctagtttttagttttgcttaaaaatattgttagttttattaaatgcaaaactaaattattggtatcatgaatttgttgtatgatgaataaaatataggggggtatagatagacgtcattttcatagggttataaatgcgactaccatgaagtttttaattgaaagtattgggttgctgataatttgagctgttctattctttttaaatatctatataggtctgttaatggattttatttttacaattttttgtgtttaggcatataaaaatcaacccgccatatgaacggcgggttaaaatatttacaacttagcaatcaaccattaacgcttgatatcgcttttaaagtcgcgtttttcatatcctgtatacagctgacgcggacgggcaatcttcataccgtcactgtgcatttcgctccagtgggcgatccagccaacggtacgtgccattgcgaaaatgacggtgaacatggaagacggaatacccatcgctttcaggatgataccagagtagaaatcgacgttcgggtacagtttcttctcgataaagtacgggtcgttcagcgcgatgttttccagctccatagccacttccagcaggtcatccttcgtgcccagctctttcagcacttcatggcaggtttcacgcattacggtggcgcgcgggtcgtaatttttgtacacgcggtgaccgaagcccatcaggcggaaagaatcatttttgtctttcgcacgacgaacaaattccggaatgtgtttaacggagctgatttcttccagcattttcagcgccgcttcgttagcaccgccgtgcgcaggtccccacagtgaagcaatacctgctgcgatacaggcaaacgggttcgcacccgaagagccagcggtacgcacggtggaggtagaggcgttctgttcatggtcagcgtgcaggatcagaatacggtccatagcacgttccagaatcggattaacttcatacggttcgcacggcgtggagaacatcatattcaggaagttaccggcgtaggagagatcgttgcgcgggtaaacaaatggctgaccaatggaatacttgtaacacatcgcggccatggtcggcattttcgacagcaggcggaacgcggcaatttcacggtgacgaggattgttaacatccagcgagtcgtgatagaacgccgccagcgcgccggtaataccacacatgactgccattggatgcgagtcgcgacggaaagcatggaacagacgggtaatctgctcgtggatcatggtatgacgggtcaccgtagttttaaattcgtcatactgttcctgagtcggtttttcaccattcagcaggatgtaacaaacttccaggtagttagaatcggtcgccagctgatcgatcgggaaaccgcggtgcagcaaaataccttcatcaccatcaataaaagtaattttagattcgcaggatgcggttgaagtgaagcctgggtcaaaggtgaacacaccttttgaaccgagagtacggatatcaataacatcttgacccagcgtgcctttcagcacatccagttcaacagctgtatccccgttgagggtgagttttgcttttgtatcagccatttaaggtctccttagcgccttattgcgtaagactgccggaacttaaatttgccttcgcacatcaacctggctttacccgttttttatttggctcgccgctctgtgaaagaggggaaaacctgggtacagagctctgggcgcttgcaggtaaaggatccattgatgacgaataaatggcgaatcaagtacttagcaatccgaattattaaacttgtctaccactaataactgtcccgaatgaattggtcaatacttccacactgttacataagttaatcttaggtgaaataccgacttcataacttttacgcattatatgcttttcctggtaatgtttgtaacaactttgttgaatgattgtcaaattagatgattaaaaattaaataaatgttgttatcgtgacctggatcactgttcaggataaaacccgacaaactatatgtaggttaattgtaatgattttgtgaacagcctatactgccgccaggtctccggaacaccctgcaatcccgagccacccagcgttgtaacgtgtcgttttcgcatctggaagcagtgttttgcatgacgcgcagttatagaaaggacgctgtctgacccgcaagcagaccggaggaaggaaatcccgacgtctccaggtaacagaaagttaacctctgtgcccgtagtccccagggaataataagaacagcatgtgggcgttattcatgataagaaatgtgaaaaaacaaagacctgttaatctggacctacagaccatccggttccccatcacggcgatagcgtccattctccatcgcgtttccggtgtgatcacctttgttgcagtgggcatcctgctgtggcttctgggtaccagcctctcttcccctgaaggtttcgagcaagcttccgcgattatgggcagcttcttcgtcaaatttatcatgtggggcatccttaccgctctggcgtatcacgtcgtcgtaggtattcgccacatgatgatggattttggctatctggaagaaacattcgaagcgggtaaacgctccgccaaaatctcctttgttattactgtcgtgctttcacttctcgcaggagtcctcgtatggtaagcaacgcctccgcattaggacgcaatggcgtacatgatttcatcctcgttcgcgctaccgctatcgtcctgacgctctacatcatttatatggtcggttttttcgctaccagtggcgagctgacatatgaagtctggatcggtttcttcgcctctgcgttcaccaaagtgttcaccctgctggcgctgttttctatcttgatccatgcctggatcggcatgtggcaggtgttgaccgactacgttaaaccgctggctttgcgcctgatgctgcaactggtgattgtcgttgcactggtggtttacgtgatttatggattcgttgtggtgtggggtgtgtgatgaaattgccagtcagagaatttgatgcagttgtgattggtgccggtggcgcaggtatgcgcgcggcgctgcaaatttcccagagcggccagacctgtgcgctgctctctaaagtcttcccgacccgttcccataccgtttctgcgcaaggcggcattaccgttgcgctgggtaatacccatgaagataactgggaatggcatatgtacgacaccgtgaaagggtcggactatatcggtgaccaggacgcgattgaatatatgtgtaaaaccgggccggaagcgattctggaactcgaacacatgggcctgccgttctcgcgtctcgatgatggtcgtatctatcaacgtccgtttggcggtcagtcgaaaaacttcggcggcgagcaggcggcacgcactgcggcagcagctgaccgtaccggtcacgcactgttgcacacgctttatcagcagaacctgaaaaaccacaccaccattttctccgagtggtatgcgctggatctggtgaaaaaccaggatggcgcggtggtgggttgtaccgcactgtgcatcgaaaccggtgaagtggtttatttcaaagcccgcgctaccgtgctggcgactggcggagcagggcgtatttatcagtccaccaccaacgcccacattaacaccggcgacggtgtcggcatggctatccgtgccggcgtaccggtgcaggatatggaaatgtggcagttccacccgaccggcattgccggtgcgggcgtactggtcaccgaaggttgccgtggtgaaggcggttatctgctgaacaaacatggcgaacgttttatggagcgttatgcgccgaacgccaaagacctggcgggccgtgacgtggttgcgcgttccatcatgatcgaaatccgtgaaggtcgcggctgtgatggtccgtgggggccacacgcgaaactgaaactcgatcacctgggtaaagaagttctcgaatcccgtctgccgggtatcctggagctttcccgtaccttcgctcacgtcgatccggtgaaagagccgattccggttatcccaacctgtcactacatgatgggcggtattccgaccaaagttaccggtcaggcactgactgtgaatgagaaaggcgaagatgtggttgttccgggactgtttgccgttggtgaaatcgcttgtgtatcggtacacggcgctaaccgtctgggcggcaactcgctgctggacctggtggtctttggtcgcgcggcaggtctgcatctgcaagagtctatcgccgagcagggcgcactgcgcgatgccagcgagtctgatgttgaagcgtctctggatcgcctgaaccgctggaacaataatcgtaacggtgaagatccggtggcgatccgtaaagcgctgcaagaatgtatgcagcataacttctcggtcttccgtgaaggtgatgcgatggcgaaagggcttgagcagttgaaagtgatccgcgagcgtctgaaaaatgcccgtctggatgacacttccagcgagttcaacacccagcgcgttgagtgcctggaactggataacctgatggaaacggcgtatgcaacggctgtttctgccaacttccgtaccgaaagccgtggcgcgcatagccgcttcgacttcccggatcgtgatgatgaaaactggctgtgccactccctgtatctgccagagtcggaatccatgacgcgccgaagcgtcaacatggaaccgaaactgcgcccggcattcccgccgaagattcgtacttactaatgcggagacaggaaaatgagactcgagttttcaatttatcgctataacccggatgttgatgatgctccgcgtatgcaggattacaccctggaagcggatgaaggtcgcgacatgatgctgctggatgcgcttatccagctaaaagagaaagatcccagcctgtcgttccgccgctcctgccgtgaaggtgtgtgcggttccgacggtctgaacatgaacggcaagaatggtctggcctgtattaccccgatttcggcactcaaccagccgggcaagaagattgtgattcgcccgctgccaggtttaccggtgatccgcgatttggtggtagacatgggacaattctatgcgcaatatgagaaaattaagccttacctgttgaataatggacaaaatccgccagctcgcgagcatttacagatgccagagcagcgcgaaaaactcgacgggctgtatgaatgtattctctgcgcatgttgttcaacctcttgtccgtctttctggtggaatcccgataagtttatcggcccggcaggcttgttagcggcatatcgtttcctgattgatagccgtgataccgagactgacagccgcctcgacggtttgagtgatgcattcagcgtattccgctgtcacagcatcatgaactgcgtcagtgtatgtccgaaggggctgaacccgacgcgcgccatcggccatatcaagtcgatgttgttgcaacgtaatgcgtaaaccgtaggcctgataagacgcgcaagcgtcgcatcaggcaaccagtgccggatgcggcgtgaacgccttatccggcctacaagtcattacccgtaggcctgataagcgcagcgcatcaggcgtaacaaagaaatgcaggaaatctttaaaaactgcccctgacactaagacagtttttaaaggttccttcgcgagccactacgtagacaagagctcgcaagtgaaccccggcacgcacatcactgtgcgtggtagtatccacggcgaagtaagcataaaaaagatgcttaagggatcacgatgcagaacagcgctttgaaagcctggttggactcttcttacctctctggcgcaaaccagagctggatagaacagctctatgaagacttcttaaccgatcctgactcggttgacgctaactggcgttcgacgttccagcagttacctggtacgggagtcaaaccggatcaattccactctcaaacgcgtgaatatttccgccgcctggcgaaagacgcttcacgttactcttcaacgatctccgaccctgacaccaatgtgaagcaggttaaagtcctgcagctcattaacgcataccgcttccgtggtcaccagcatgcgaatctcgatccgctgggactgtggcagcaagataaagtggccgatctggatccgtctttccacgatctgaccgaagcagacttccaggagaccttcaacgtcggttcatttgccagcggcaaagaaaccatgaaactcggcgagctgctggaagccctcaagcaaacctactgcggcccgattggtgccgagtatatgcacattaccagcaccgaagaaaaacgctggatccaacagcgtatcgagtctggtcgcgcgactttcaatagcgaagagaaaaaacgcttcttaagcgaactgaccgccgctgaaggtcttgaacgttacctcggcgcaaaattccctggcgcaaaacgcttctcgctggaaggcggtgacgcgttaatcccgatgcttaaagagatgatccgccacgctggcaacagcggcacccgcgaagtggttctcgggatggcgcaccgtggtcgtctgaacgtgctggtgaacgtgctgggtaaaaaaccgcaagacttgttcgacgagttcgccggtaaacataaagaacacctcggcacgggtgacgtgaaataccacatgggcttctcgtctgacttccagaccgatggcggcctggtgcacctggcgctggcgtttaacccgtctcaccttgagattgtaagcccggtagttatcggttctgttcgtgcccgtctggacagacttgatgagccgagcagcaacaaagtgctgccaatcaccatccacggtgacgccgcagtgaccgggcagggcgtggttcaggaaaccctgaacatgtcgaaagcgcgtggttatgaagttggcggtacggtacgtatcgttatcaacaaccaggttggtttcaccacctctaatccgctggatgcccgttctacgccgtactgtactgatatcggtaagatggttcaggccccgattttccacgttaacgcggacgatccggaagccgttgcctttgtgacccgtctggcgctcgatttccgtaacacctttaaacgtgatgtcttcatcgacctggtgtgctaccgccgtcacggccacaacgaagccgacgagccgagcgcaacccagccgctgatgtatcagaaaatcaaaaaacatccgacaccgcgcaaaatctacgctgacaagctggagcaggaaaaagtggcgacgctggaagatgccaccgagatggttaacctgtaccgcgatgcgctggatgctggcgattgcgtagtggcagagtggcgtccgatgaacatgcactctttcacctggtcgccgtacctcaaccacgaatgggacgaagagtacccgaacaaagttgagatgaagcgcctgcaggagctggcgaaacgcatcagcacggtgccggaagcagttgaaatgcagtctcgcgttgccaagatttatggcgatcgccaggcgatggctgccggtgagaaactgttcgactggggcggtgcggaaaacctcgcttacgccacgctggttgatgaaggcattccggttcgcctgtcgggtgaagactccggtcgcggtaccttcttccaccgccacgcggtgatccacaaccagtctaacggttccacttacacgccgctgcaacatatccataacgggcagggcgcgttccgtgtctgggactccgtactgtctgaagaagcagtgctggcgtttgaatatggttatgccaccgcagaaccacgcactctgaccatctgggaagcgcagttcggtgacttcgccaacggtgcgcaggtggttatcgaccagttcatctcctctggcgaacagaaatggggccggatgtgtggtctggtgatgttgctgccgcacggttacgaagggcaggggccggagcactcctccgcgcgtctggaacgttatctgcaactttgtgctgagcaaaacatgcaggtttgcgtaccgtctaccccggcacaggtttaccacatgctgcgtcgtcaggcgctgcgcgggatgcgtcgtccgctggtcgtgatgtcgccgaaatccctgctgcgtcatccgctggcggtttccagcctcgaagaactggcgaacggcaccttcctgccagccatcggtgaaatcgacgagcttgatccgaagggcgtgaagcgcgtagtgatgtgttctggtaaggtttattacgacctgctggaacagcgtcgtaagaacaatcaacacgatgtcgccattgtgcgtatcgagcaactctacccgttcccgcataaagcgatgcaggaagtgttgcagcagtttgctcacgtcaaggattttgtctggtgccaggaagagccgctcaaccagggcgcatggtactgcagccagcatcatttccgtgaagtgattccgtttggggcttctctgcgttatgcaggccgcccggcctccgcctctccggcggtagggtatatgtccgttcaccagaaacagcaacaagatctggttaatgacgcgctgaacgtcgaataaataaaggatacacaatgagtagcgtagatattctggtccctgacctgcctgaatccgtagccgatgccaccgtcgcaacctggcataaaaaacccggcgacgcagtcgtacgtgatgaagtgctggtagaaatcgaaactgacaaagtggtactggaagtaccggcatcagcagacggcattctggatgcggttctggaagatgaaggtacaacggtaacgtctcgtcagatccttggtcgcctgcgtgaaggcaacagcgccggtaaagaaaccagcgccaaatctgaagagaaagcgtccactccggcgcaacgccagcaggcgtctctggaagagcaaaacaacgatgcgttaagcccggcgatccgtcgcctgctggctgaacacaatctcgacgccagcgccattaaaggcaccggtgtgggtggtcgtctgactcgtgaagatgtggaaaaacatctggcgaaagccccggcgaaagagtctgctccggcagcggctgctccggcggcgcaaccggctctggctgcacgtagtgaaaaacgtgtcccgatgactcgcctgcgtaagcgtgtggcagagcgtctgctggaagcgaaaaactccaccgccatgctgaccacgttcaacgaagtcaacatgaagccgattatggatctgcgtaagcagtacggtgaagcgtttgaaaaacgccacggcatccgtctgggctttatgtccttctacgtgaaagcggtggttgaagccctgaaacgttacccggaagtgaacgcttctatcgacggcgatgacgtggtttaccacaactatttcgacgtcagcatggcggtttctacgccgcgcggcctggtgacgccggttctgcgtgatgtcgataccctcggcatggcagacatcgagaagaaaatcaaagagctggcagtcaaaggccgtgacggcaagctgaccgttgaagatctgaccggtggtaacttcaccatcaccaacggtggtgtgttcggttccctgatgtctacgccgatcatcaacccgccgcagagcgcaattctgggtatgcacgctatcaaagatcgtccgatggcggtgaatggtcaggttgagatcctgccgatgatgtacctggcgctgtcctacgatcaccgtctgatcgatggtcgcgaatccgtgggcttcctggtaacgatcaaagagttgctggaagatccgacgcgtctgctgctggacgtgtagtagtttaagtttcacctgcactgtagaccggataaggcattatcgccttctccggcaattgaagcctgatgcgacgctgacgcgtcttatcaggcctacgggaccaccaatgtaggtcggataaggcgcaagcgccgcatccgacaagcgatgcctgatgtgacgtttaacgtgtcttatcaggcctacgggtgaccgacaatgcccggaagcgatacgaaatattcggtctacggtttaaaagataacgattactgaaggatggacagaacacatgaacttacatgaatatcaggcaaaacaactttttgcccgctatggcttaccagcaccggtgggttatgcctgtactactccgcgcgaagcagaagaagccgcttcaaaaatcggtgccggtccgtgggtagtgaaatgtcaggttcacgctggtggccgcggtaaagcgggcggtgtgaaagttgtaaacagcaaagaagacatccgtgcttttgcagaaaactggctgggcaagcgtctggtaacgtatcaaacagatgccaatggccaaccggttaaccagattctggttgaagcagcgaccgatatcgctaaagagctgtatctcggtgccgttgttgaccgtagttcccgtcgtgtggtctttatggcctccaccgaaggcggcgtggaaatcgaaaaagtggcggaagaaactccgcacctgatccataaagttgcgcttgatccgctgactggcccgatgccgtatcagggacgcgagctggcgttcaaactgggtctggaaggtaaactggttcagcagttcaccaaaatcttcatgggcctggcgaccattttcctggagcgcgacctggcgttgatcgaaatcaacccgctggtcatcaccaaacagggcgatctgatttgcctcgacggcaaactgggcgctgacggcaacgcactgttccgccagcctgatctgcgcgaaatgcgtgaccagtcgcaggaagatccgcgtgaagcacaggctgcacagtgggaactgaactacgttgcgctggacggtaacatcggttgtatggttaacggcgcaggtctggcgatgggtacgatggacatcgttaaactgcacggcggcgaaccggctaacttccttgacgttggcggcggcgcaaccaaagaacgtgtaaccgaagcgttcaaaatcatcctctctgacgacaaagtgaaagccgttctggttaacatcttcggcggtatcgttcgttgcgacctgatcgctgacggtatcatcggcgcggtagcagaagtgggtgttaacgtaccggtcgtggtacgtctggaaggtaacaacgccgaactcggcgcgaagaaactggctgacagcggcctgaatattattgcagcaaaaggtctgacggatgcagctcagcaggttgttgccgcagtggaggggaaataatgtccattttaatcgataaaaacaccaaggttatctgccagggctttaccggtagccaggggactttccactcagaacaggccattgcatacggcactaaaatggttggcggcgtaaccccaggtaaaggcggcaccacccacctcggcctgccggtgttcaacaccgtgcgtgaagccgttgctgccactggcgctaccgcttctgttatctacgtaccagcaccgttctgcaaagactccattctggaagccatcgacgcaggcatcaaactgattatcaccatcactgaaggcatcccgacgctggatatgctgaccgtgaaagtgaagctggatgaagcaggcgttcgtatgatcggcccgaactgcccaggcgttatcactccgggtgaatgcaaaatcggtatccagcctggtcacattcacaaaccgggtaaagtgggtatcgtttcccgttccggtacactgacctatgaagcggttaaacagaccacggattacggtttcggtcagtcgacctgtgtcggtatcggcggtgacccgatcccgggctctaactttatcgacattctcgaaatgttcgaaaaagatccgcagaccgaagcgatcgtgatgatcggtgagatcggcggtagcgctgaagaagaagcagctgcgtacatcaaagagcacgttaccaagccagttgtgggttacatcgctggtgtgactgcgccgaaaggcaaacgtatgggccacgcgggtgccatcattgccggtgggaaagggactgcggatgagaaattcgctgctctggaagccgcaggcgtgaaaaccgttcgcagcctggcggatatcggtgaagcactgaaaactgttctgaaataaatatctgtaataagaaatagccctcgccgcttccctctacaggaatggcgaagggctgtcggtttcgacatggttggccatcgtatgatggccttttttgtgcttatcgcgatgattttcgctgcgctatcagggtaaatttatagtcatcggtattaaaagcgttgcggctatattcaaacacccgaccatcaactaaatatccacgcgatactttttcaagaatcggctttgtctggctgatattaagcagacggctcatctcttcggttggcatcagaggaatgatttcctgttcgctacgatcgataaccattttcttcacttcttcgataaagtgatatttcgaattttccatgacctgccaggtgagatccgggaacaacgcaagcggcatccaggtttcttccagcgccattggcttttgcttgcgatagcgcacgcgcttcacatgccacacacgatcctgcggggtgatttgtagctgttgctgaagaaaatcgtcagccggaatcacttcgaatatcagaacttcactgtgtgtatcgacgtgacggtccgacagtttttcatcaaaactggttaactgaaaaatatcgtaattgacccgctcttctttgacgtaagtcccgctgccctgaatgctttcgaggatctgctgctcgactagctggcgcaaagcctgacgcaccgtaacccggctgacgccaaactctgtttgtagcgctgattcagtgggtaacgcatcgccaggtttaagctcgccacgcgcaatttgttcacgaatgcgatcggcaatctgccggtataagggcttgtgtcccatttttagtatctcattaatacgaatttaaccattatgcccgataaattcatcctgtaaataatacaaatacaatacaaataatttcaatcaagtgaaattgatcacataatggtattgttttatcgggcacactggcgcgactataaaaacgatcaagtgaggatcatgatgaatctgacgactctgacccaccgcgatgcgttgtgtctgaatgcgcgctttaccagccgtgaagaggccatccacgcgttgactcaacgtcttgctgctctggggaaaatttccagtactgagcaatttctggaagaagtgtatcgccgtgaaagccttggcccgaccgccttaggtgaagggttggctgtgccgcatggcaaaactgctgcggtaaaagaagcggcgtttgcggtcgccacactcagcgagccgcttcagtgggaaggcgttgatggcccggaagcagttgatttagtggtgctgctggcgattccccccaatgaagcgggtactacgcatatgcaactgctgacagcgctgaccacgcgccttgcggatgatgagattcgggcgcgtatacagtcggcgacgacgcctgatgagttgctctcggcgctggatgacaagggaggcacgcaaccttctgcctctttttccaacgcgccaactatcgtctgcgtaacggcctgtccggcgggtattgctcacacctatatggctgcggaatatctggaaaaagccggacgcaaactcggcgtaaatgtttacgttgaaaaacaaggcgctaacggcattgaagggcgtttaacggcggatcaactcaatagtgcaaccgcctgtatttttgcggctgaagtcgccatcaaggagagtgagcgttttaatggcattcccgcgctttcagtgcctgttgccgagccgattcgccatgcagaagcgttgatccaacaagcgcttaccctcaagcgtagcgatgagacgcgtaccgtacagcaagatacgcaaccggtgaaaagtgtcaaaacggagctgaaacaggcactgttgagcggaatctcttttgccgtaccgttgattgtcgcggggggcacggtgctggcggtcgcggtattactgtcgcaaatcttcgggctacaagatctgtttaatgaagaaaactcctggctgtggatgtaccgcaagctgggcggcgggctgctcggaattttgatggtaccggtgctcgcggcctataccgcctattctctggcagataaaccggcgttagcgccaggctttgcggctggacttgccgccaacatgatcggctccgggtttctcggcgcggtcgttggcggattgatagccggttacttgatgcgctgggtgaaaaatcacttgcgtcttagcagtaaattcaatggattcctgactttttatctctacccggtgctcggtacgttgggagcgggcagtctgatgctgtttgtggtgggggaacctgtcgcctggatcaataactcgcttaccgcctggctgaacggtctgtcaggaagtaacgcgctgttgctgggtgccattctcggttttatgtgttcctttgaccttggagggccagtgaataaagccgcttatgcattctgcctgggcgcaatggcgaacggcgtttacggcccgtatgccattttcgcctccgtcaaaatggtttcggcatttaccgtaaccgcttccacgatgctcgcaccgcgcctgtttaaagagtttgaaattgagaccgggaaatccacctggctgttagggctggcaggtattaccgaaggggcgatcccgatggcgattgaagatccgctgcgggttattggttcgtttgtgctgggctctatggtaacgggcgctattgtcggtgcgatgaatatcggcctttcgacacccggtgccggcattttctcgctctttttacttcatgataatggcgcgggcggtgttatggcggcaattggctggtttggcgcggcattggtgggggctgcaatctcgactgcaattctcctgatgtggcggcgtcacgcggttaagcatggcaactatctgactgatggcgtaatgccataaacaaaaaggaaacgacgatgaaagcagtatctcgcgttcacatcaccccgcatatgcactgggatcgagagtggtatttcaccaccgaagagtcacgtattctgctggtcaataatatggaagagatcctgtgccgactggaacaggacaacgaatacaaatattacgtactcgacgggcaaacggcgatcctcgaagattatttcgcggtgaaaccggaaaacaaagaccgtgtgaagaaacaggtagaagccggcaagttgattatcggcccctggtatacccagaccgataccacgattgtttctgcggaatccatcgtccgtaatctgatgtacggaatgcgtgactgcctcgcgtttggcgagccgatgaaaataggttatttaccagattcctttggcatgtccgggcaactgccgcatatctacaatggatttggcattacccgcaccatgttctggcgcggatgttcggagcgccacggtactgataaaaccgagtttttgtggcaaagcagtgacggtagcgaagtgacggcgcaggtgctgccgctgggctacgccatcggtaagtacttacctgccgacgaaaacggattacgtaaacgcctcgacagttattttgacgtgctggaaaaagcgtctgtaaccaaagagattttgctgccgaatgggcatgaccagatgccattgcagcaaaatatcttcgaagtgatggataagctacgtgagatctaccctcaacgtaagtttgtgatgagccgctttgaagaggtatttgagaagatcgaagcgcagcgagataatctggcaaccctgaaaggggaatttattgatggcaaatatatgcgcgtgcatcgcaccatcggttctacgcgtatggatatcaaaattgcccacgcgcgtattgaaaataagattgttaatctgctggaaccgctggcaacactggcctggacgttgggttttgaataccaccacggcttgctggagaaaatgtggaaagagatcttaaaaaatcatgcccacgacagtatcggctgctgctgtagtgacaaagttcatcgcgaaatcgtcgcccgcttcgaactggctgaagacatggcggataatctgattcgtttctacatgcgcaaaattgccgacaacatgccgcagagcgacgccgacaaactcgtcctgtttaacctgatgccctggccgcgtgaagaagttatcaacaccactgtgcggctgcgcgccagccagtttaatttgcgggacgatcgcggtcagcctgtaccgtattttattcgccatgcccgtgagatcgatccaggcctaatcgatcggcaaatagttcattacggtaattacgatccctttatggagtttgatatacagatcaaccagattgtcccttctatgggctatcgcacgctttatatcgaagcgaatcagcctggcaacgtaattgcggcaaaaagtgacgctgaagggatactggaaaatgctttctggcaaattgcgctcaatgaggatggttctctgcaactggtagataaagacagcggtgtgcgctatgaccgggtattgcaaattgaagaaagctctgatgatggtgatgaatatgactattcacccgcaaaagaagagtgggtaattaccgcagcgaacgcgaaaccgcaatgcgatattattcatgaagcctggcagagcagggctgttatccgctatgacatggcagtgccgctcaatttgtcagaacgcagcgcccggcaatccactggcagagtaggggtggtgttggttgtcactcttagtcataacagcaggcgtattgatgtggatatcaatcttgataaccaggctgacgatcatcgccttcgtgtcctggtccctacaccttttaacaccgacagtgttctggcagatacgcagtttggttcgctaacgcgccccgtgaacgacagtgcaatgaacaactggcagcaagaaggctggaaagaagcgccggttccggtatggaatatgctcaactatgttgccttacaggaagggcgtaacggcatggctgtctttagcgaagggttacgtgaatttgaagtcatcggtgaagagaagaaaacctttgccattacgttgctgcgtggcgtgggcttactgggcaaagaagatctgcttttaaggcctgggcggccttcgggaattaaaatgccagtcccggactcacaactacgtggtctgctttcttgtcgcctaagtttattgagttataccggtacgccaaccgccgctggtgtagctcagcaggcgcgagcatggctgactccagtacagtgttacaacaaaatcccatgggatgtgatgaagctcaacaaagccggattcaacgtgccggaaagttatagtttgttgaaaatgcccccagtgggatgcctgataagcgcacttaagaaagctgaagaccgacaagaagtgattttacggctgtttaatccggctgaatcagcaacctgtgatgcgactgttgctttcagtcgcgaggtgatttcttgctcagaaacgatgatggatgaacacattaccaccgaggaaaatcaaggttcaaatctatcggggccttttttacccggccagtcacggacgttcagttaccggcttgcctgaatagcaatcaaaccgaagccacatatgcgcggccagattgttgacaaagggcgctttgttcatgccggatacggcatgaacgctttattcggtctacaaaagcaggcaaattcaatatattgcagagatgatgtagacactggcaagcgtagcgcatcaggtaattttgcgtttatcttcactctcaagccacgtatatgtggctttatttttaacaaaataataaccctgggtgagttaattataatataattataagttaactaaatgttaatattggcggggtggatttatgcctttattagtaatcctgaaactctgcgtcgtattagccagtgaccaaaaaaagaattaaggtcaaccgtgctgtttttgcttcgtctctttttatctttaattgccaaccgaaactaatttcagccttataactcacacattttaaacataaatgtcactaaagttaccttattgaaacatgattaacataatttgtaggaattgatatttatcaatgtataagtcttggaaatgggcatcaaaaagagataaattgttctcgatcaaattggctgaaaggcggtaatttagctataaattgatcaccgtcgaaaaatgcaaatttgcttcaacaaaaacctgtttattgtaaggattttgcggcgtaatatatacgtgggatcaatttgagtttttattaacatgtttgcaacctttctttacgccgtttttgtgtgcattcacatggtatgatgaaagtgttcaaacaaatttctattggggcatgcgtgtgaccctttctaacggggttcactctcggagtcttcatgcgatgagcaaggagtcatgatgttagatatagtcgaactgtcgcgcttacagtttgccttgaccgcgatgtaccacttcctttttgtgccactgacgctcggtatggcgttcctgctggccattatggaaacggtctacgtcctctccggcaaacagatttataaagatatgaccaagttctggggcaagttgtttggtatcaacttcgctctgggtgtggctaccggtctgaccatggagttccagttcgggactaactggtcttactattcccactatgtaggggatatcttcggtgcgccgctggcaatcgaaggtctgatggccttcttcctcgaatccacctttgtaggtctgttcttcttcggttgggatcgtctgggtaaagttcagcatatgtgtgtcacctggctggtggcgctcggttcaaacctgtccgcactgtggattctggttgcgaacggctggatgcaaaacccaatcgcgtccgatttcaactttgaaactatgcgtatggagatggtgagcttctccgagctggtgcttaacccggttgctcaggtgaaattcgttcacactgtagcgtctggttatgtgactggcgcgatgttcatcctcggtatcagcgcatggtatatgctgaaaggtcgtgacttcgccttcgctaaacgctcctttgctatcgctgccagcttcggtatggctgctgttctgtctgttattgttctgggtgatgaatccggctacgaaatgggcgacgtgcagaaaaccaaactggctgctattgaagccgagtgggaaacgcaacctgcgcctgctgcctttactctgttcggcattcctgatcaggaagaggagacgaacaaatttgcgattcagatcccttacgcactgggcatcattgcaacgcgttccgtggataccccggttatcggcctgaaagagctgatggtgcagcatgaagaacgcattcgtaacgggatgaaggcgtactctctgctcgaacaactgcgttctggttctaccgaccaggcggttcgtgaccagttcaatagcatgaagaaagacctcggttacggtctgctgctgaaacgctatacgccaaacgtggctgatgcgactgaagcgcagattcaacaggcaaccaaagactccatcccgcgtgtagcgccgctgtactttgcgttccgtatcatggtggcgtgtggcttcctgcttctggcaatcatcgcgctctctttctggagtgtcatccgcaaccgcattggcgagaaaaaatggcttctgcgcgccgcgctgtacggtattccgctgccgtggattgctgtagaagcgggctggttcgtggctgaatatggccgccaaccgtgggctatcggtgaagtgctgccgacagctgtggcgaactcgtcactgaccgcaggcgatctcatcttctcaatggtgctgatttgcggcctgtataccctgttcctggtggcagaattgttcttaatgttcaagtttgcacgcctcggcccaagcagcctgaaaaccggtcgctatcactttgagcagtcttccacgactactcagccggcacgctaagacaggagtcgtcaaatgatcgattatgaagtattgcgttttatctggtggctgctggttggcgttctgctgattggttttgcagtcactgacggtttcgacatgggggtgggcatgctcacccgtttcctcggtcgtaacgacaccgagcgtcgaattatgattaactccattgcaccacactgggacggtaaccaggtttggctgatcaccgcgggcggcgcactctttgctgcctggccgatggtctatgccgctgcgttctccggcttctatgtggcgatgatcctcgtgctggcgtctttgttcttccgtccggtcggttttgactaccgctccaagattgaagaaacccgctggcgtaacatgtgggactggggcatcttcattggtagcttcgttccgccgctggtaattggtgtagcgttcggtaacctgttgcagggcgtaccgttcaacgttgatgaatatctgcgtctgtactacaccggtaacttcttccagttgcttaacccgttcggcctgctggcaggcgtggtgagcgtagggatgatcattactcagggcgcaacctatctgcaaatgcgtaccgtgggcgaactgcacctgcgtacccgtgcaacggctcaggtggctgcgctggtgacactggtctgtttcgcactggctggcgtatgggtgatgtacggtatcgatggttatgtcgtgaaatcgacaatggaccattacgcagcctctaacccactgaataaagaagtggttcgtgaagctggcgcatggctggttaacttcaacaacacgccaattctgtgggctattccggcactgggtgtggttctgccgctgctgaccatcctgactgcacgtatggataaagccgcgtgggcgtttgtgttctcctccctgacgctggcctgcatcatcctgacagccggtatcgcaatgttcccgtttgtgatgccgtccagcaccatgatgaacgcaagtctgacaatgtgggatgcaacttccagccagctgacgcttaacgtcatgacctgggttgcggtggttctggtaccgatcattctgctctacaccgcctggtgttactggaaaatgttcggtcgtatcaccaaagaagatattgaacgtaacacccactctctgtactaagtaaggagctaaaaatgtggtatttcgcatggattctgggaacgcttcttgcctgttcgtttggggtaatcaccgcgctggcgcttgaacacgtcgaatcaggcaaagccggtcaagaagacatctgatgagtaagattatcgcgactttgtatgcggtaatggacaagcgccccctgcgggcgctttccttcgtgatggcgcttctgttagcaggatgtatgttttgggacccatctcgttttgccgcgaagaccagtgaactggaaatctggcatggtttattgctgatgtgggccgtctgtgctggtgtgattcacggcgtgggctttcgtccgcagaaggttctttggcaagggattttttgcccattgcttgccgatattgttctcattgtcgggctgattttcttcttcttttaaatcagaattctctttaaaaaattatgggccgctccaggcccataaatttttacgctcccttaacttgccctcattcccaaacctcaatcgcgcgcgtatagtagcagcgtttaaaagctctaacttttgttgcattaccgggatgtaaagtgaatacaacgctgtttcgatggccggttcgcgtctactatgaagataccgatgccggtggtgtggtgtaccacgccagttacgtcgctttttatgaaagagcacgcacagagatgctgcgtcatcatcacttcagtcagcaggcgctgatggctgaacgcgttgcctttgtggtacgtaaaatgacggtggaatattacgcacctgcgcggctcgacgatatgctcgaaatacagactgaaataacatcaatgcgtggcacctctttggttttcacgcaacgtattgtcaacgccgagaatactttgctgaatgaagcagaggttctggttgtttgcgttgacccactcaaaatgaagcctcgtgcgcttcccaagtctattgtcgcggagtttaagcagtgactgacatgaatatccttgatttgttcctgaaggctagccttctggttaaacttatcatgttgattttgattggtttttcaatcgcatcttgggccattattatccagcggacccgtattcttaacgcagcggcgcgcgaagccgaagcgtttgaagataaattctggtctggaatcgaactctctcgcctctatcaagagagccaggggaaacgggataatctgactggttcggaacaaatcttttacagcgggttcaaagagtttgtgcgcctgcatcgtgccaatagccatgcgccggaagccgtagtggaaggggcgtcgcgtgctatgcgtatctccatgaaccgtgaacttgaaaatctggaaacgcacattccgttcctcggtacggttggctccatcagcccgtatattggtctgtttggtacggtctgggggatcatgcacgcctttatcgccctcggggcggtaaaacaagcaacactgcaaatggttgcgcccggtatcgcagaagcgttgattgcgactgcaattggtctgtttgccgctatcccggcagttatggcctacaaccgcctcaaccagcgcgtaaacaaactggaactgaattacgacaactttatggaagagtttaccgcgattctgcaccgccaggcgtttaccgttagcgagagcaacaaggggtaagccatggccagagcgcgtggacgaggtcgtcgcgatctcaagtccgaaatcaacattgtaccgttgctggacgtactgctggtgctgttgctgatctttatggcgacagcgcccatcatcacccagagcgtggaggtcgatctgccagacgctactgaatcacaggcggtgagcagtaacgataatccgccagtgattgttgaagtgtctggtattggtcagtacaccgtggtggttgagaaagatcgcctggagcgtttaccaccagagcaggtggtggcggaagtgtccagccgtttcaaggccaacccgaaaacggtctttctgatcggtggcgcaaaagatgtgccttacgatgaaataattaaagcactgaacttgttacatagtgcgggtgtgaaatcggttggtttaatgacgcagcctatctaaacatctgcgtttcccttgcttgaaagagagcgggtaacaggcgaacagtttttggaaaccgagagtgtcaaaggcaaccgaacaaaacgacaagctcaagcgggcgataattatttcagcagtgctgcatgtcatcttatttgcggcgctgatctggagttcgttcgatgagaatatagaagcttcagccggaggcggcggtggttcgtccatcgacgctgtcatggttgattcaggtgcggtagttgagcagtacaaacgcatgcaaagccaggaatcaagcgcgaagcgttctgatgaacagcgcaagatgaaggaacagcaggctgctgaagaactgcgtgagaaacaagcggctgaacaggaacgcctgaagcaacttgagaaagagcggttagcggctcaggagcagaaaaagcaggctgaagaagccgcaaaacaggccgagttaaagcagaagcaagctgaagaggcggcagcgaaagcggcggcagatgctaaagcgaaggccgaagcagatgctaaagctgcggaagaagcagcgaagaaagcggctgcagacgcaaagaaaaaagcagaagcagaagccgccaaagccgcagccgaagcgcagaaaaaagccgaggcagccgctgcggcactgaagaagaaagcggaagcggcagaagcagctgcagctgaagcaagaaagaaagcggcaactgaagctgctgaaaaagccaaagcagaagctgagaagaaagcggctgctgaaaaggctgcagctgataagaaagcggcagcagagaaagctgcagccgacaaaaaagcagcagaaaaagcggctgctgaaaaggcagcagctgataagaaagcagcggcagaaaaagccgccgcagacaaaaaagcggcagcggcaaaagctgcagctgaaaaagccgctgcagcaaaagcggccgcagaggcagatgatattttcggtgagctaagctctggtaagaatgcaccgaaaacggggggaggggcgaaagggaacaatgcttcgcctgccgggagtggtaatactaaaaacaatggcgcatcaggggccgatatcaataactatgccgggcagattaaatctgctatcgaaagtaagttctatgacgcatcgtcctatgcaggcaaaacctgtacgctgcgcataaaactggcacccgatggtatgttactggatatcaaacctgaaggtggcgatcccgcactttgtcaggctgcgttggcagcagctaaacttgcgaagatcccgaaaccaccaagccaggcagtatatgaagtgttcaaaaacgcgccattggacttcaaaccgtaatcgcgatgttgactgttcggacggtcaacatcaggcaccggttgccacggggttctggtagttttgtgtattttagtttgttaacattctgctaaattatcgtgggccatcggtccagataagggagatatgatgaagcaggcattacgagtagcatttggttttctcatactgtgggcatcagttctgcatgctgaagtccgcattgtgatcgacagcggtgtagattccggtcgtcctattggtgttgttcctttccagtgggcggggcctggtgcggcacctgaagatattggcggcatcgttgctgctgacttgcgtaacagcggtaaatttaatccgttagatcgcgctcgtctgccacagcagccgggtagtgcgcaggaagtacaaccagctgcatggtccgcactgggcattgacgctgtagttgtcggtcaggtcactccgaatccggatggttcttacaatgttgcttatcaacttgttgacactggcggcgcaccgggtactgtacttgctcagaactcgtacaaagtgaacaagcagtggctgcgttatgctggtcataccgccagtgatgaagtgtttgaaaaactgaccggcattaaaggtgcgttccgtactcgtattgcctacgttgttcagaccaacggcggtcagttcccgtatgaactgcgcgtatctgactatgacggttacaaccagtttgtcgttcaccgttcaccgcagccgctgatgtctccggcgtggtcaccagacggttctaaactggcttatgtgaccttcgaaagcggtcgttccgcgctggttattcagacgctggcaaatggcgctgtacgtcaggtggcttcattcccgcgtcacaacggtgcacctgcattctcgccagacggcagcaaactggcattcgccttgtcgaaaaccggtagtctgaacctgtacgtaatggatttggcttctggtcagatccgccaggtgactgatggtcgcagtaacaataccgaaccgacctggttcccggatagccagaacctggcatttacttctgaccaggccggtcgtccgcaggtttataaagtgaatatcaacggcggtgcgccacaacgtattacctgggaaggttcgcagaaccaggatgcggatgtcagcagcgacggtaaatttatggtaatggtcagctccaatggtgggcagcagcacattgccaaacaagatctggcaacgggaggcgtacaagttctgtcgtccacgttcctggatgaaacgccaagtctggcacctaacggcactatggtaatctacagctcttctcaggggatgggatccgtgctgaatttggtttctacagatgggcgtttcaaagcgcgtcttccggcaactgatggacaggtcaaattccctgcctggtcgccgtatctgtgataataattaattgaatagtaaaggaatcattgaaatgcaactgaacaaagtgctgaaagggctgatgattgctctgcctgttatggcaattgcggcatgttcttccaacaagaacgccagcaatgacggcagcgaaggcatgctgggtgccggcactggtatggatgcgaacggcggcaacggcaacatgtcttccgaagagcaggctcgtctgcaaatgcaacagctgcagcagaacaacatcgtttacttcgatctggacaagtacgatatccgttctgacttcgctcaaatgctggatgcacatgcaaacttcctgcgtagcaacccgtcttacaaagtcaccgtagaaggtcacgcggacgaacgtggtactccggaatacaacatctccctgggtgaacgtcgtgcgaacgccgttaagatgtacctgcagggtaaaggcgtttctgcagaccagatctccatcgtttcttacggtaaagaaaaacctgcagtactgggtcatgacgaagcggcatactccaaaaaccgtcgtgcggtactggtttactaagagaattgcatgagcagtaacttcagacatcaactattgagtctgtcgttactggttggtatagcggccccctgggccgcttttgctcaggcaccaatcagtagtgtcggctcaggctcggtcgaagaccgcgtcactcaacttgagcgtatttctaatgctcacagccagcttttaacccaactccagcaacaactttctgataatcaatccgatattgattccctgcgtggtcagattcaggaaaatcagtatcaactgaatcaggtcgtggagcggcaaaagcagatcctgttgcagatcgacagcctcagcagcggtggtgcagcggcgcaatcaaccagcggcgatcaaagcggtgcggcggcatcaacgacgccgacagctgatgctggtactgcgaatgctggcgcgccggtgaaaagcggtaatgcaaacacggattacaatgcagctattgcgctggtgcaggataaatcccgccaggatgacgcaatggtggcatttcagaatttcatcaaaaattaccctgattcaacttacctgccaaacgccaattattggctgggtcagttaaactacaacaagggtaaaaaagatgatgcggcgtactattttgcttcggtagtgaaaaactatccgaagtcaccaaaggctgcagatgcgatgtttaaagtcggcgtcatcatgcaggacaaaggtgacaccgcaaaagcgaaagccgtataccagcaggttatcagtaaataccctggtactgatggcgctaaacaggcacaaaaacgtctgaacgcgatgtaatgcataacacacgaccagaagtcgcattatttctggtcgtgtcgtgcgaatcataagcagttgagtgatctacatcgaaatttttgttgcgctcaagtctgaaatcagtaatatatgccgccgttgccacgggatatcaaacaaaccgaaagcaacgaaaaagtgggtcgttagctcagttggtagagcagttgacttttaatcaattggtcgcaggttcgaatcctgcacgacccaccaatcgctaaggtggaagcggtagtaaaacgtgaaggataacgttgcatgagcaacggcccgaagggcgagacgaagtcgagtcatcctgcacgacccaccactaacatagttagttgtagtatccagcgtagtatcgggtgattagctcagctgggagagcacctcccttacaaggagggggtcggcggttcgatcccgtcatcacccaccaccgggtcgttagctcagttggtagagcagttgacttttaatcaattggtcgcaggttcgaatcctgcacgacccaccagttttaacatcgaagacagatgttaagcgtgtaggataacgttgcgtcagcaacggcccgtagggcgagcgaagcgagtcatcctgcacgacccaccactaatgacggtgggttcggtggaagtagtttgtagtatccagcgcagtatcgggtgattagctcagctgggagagcacctcccttacaaggagggggtcggcggttcgatcccgtcatcacccaccactcgggtcgttagctcagttggtagagcagttgacttttaatcaattggtcgcaggttcgaatcctgcacgacccaccagttttaacatcaaactcagatgttaagcgtgaaggataacgttgcgccagcaacggcccgtagggcgagcgaagcgagtcatcctgcacgacccaccaatcttaaagattggccccgagtaaaaatctttcaggtaacacccgtatgggtcgttagctcagttggtagagcagttgacttttaatcaattggtcgcaggttcgaatcctgcacgacccaccaatttaaaggtggttactggtagagaacgtgaaggataacgttgcgttagcaacggcccgaagggcgagacgaagtcgagtcatcctgcacgacccaccatcctgaatgattaaggcagcataatcccgcaaggggtcgttagctcagttggtagagcagttgacttttaatcaattggtcgcaggttcgaatcctgcacgacccaccaatgtaaaaaagcgccctaaaggcgcttttttgctatctgcgatactcaaagattcgaacctgcagcaggtttgagttgagcgcagcgaaacaacggagccgctcgcggcgacggcccgaagggcgagcgaagcgagtcatcctgcacgacccaccaatgtaaaaaagcgccctaaaggcgcttttttgctattcaggcatcctcaatttcactttgtaaacctgatgacatcgtcagagcttactgtgcaagcaactctatgtcggtggaattaggcgtaaaatgacgcatcctgcacattaggcgtaattcgagtgacttttccccaccattcgactatcttgtttagcatataaaacaaattacaccgataacagcgaatattacgctaatgtcggttttaacgttaagcctgtaaaacgagatggtaagatgagcgtaatgtttgatccagacacggcgatttatcctttccccccgaagccgacgccgttaagcattgatgaaaaagcgtattaccgcgagaagataaaacgtctgctaaaagaacgtaatgcggtgatggttgcccactactataccgatcccgaaattcaacaactggcagaagaaaccggtggctgtatttctgattctctggaaatggcgcgcttcggtgcaaagcatcccgcttctactttgttagtcgctggggtgagatttatgggagaaaccgccaaaattctcagtccggaaaaaacaattctgatgccgacacttcaggctgaatgttcactggatctcggctgccctgttgaagaatttaacgcattttgcgatgcccatcccgatcgtactgtcgtcgtctacgccaacacttctgctgcggtaaaagcgcgcgcagattgggtggtaacttcaagcattgccgtcgaacttattgatcatcttgatagtttgggtgaaaaaatcatctgggcacccgacaaacatctggggcgttacgtgcaaaaacagacgggtggagacattctatgctggcagggtgcctgtattgtgcatgatgaatttaagactcaggcgttaacccgcttgcaagaagaatacccggatgctgccatactggtgcatccagaatcaccacaagctattgtcgatatggcggatgcggtcggttccaccagtcaactgatcgctgctgcgaaaacattgccacatcagaggcttattgtggcaaccgatcggggtattttctacaaaatgcagcaggcggtgccagataaagagttactggaagcaccaaccgcaggtgagggtgcaacctgccgcagctgcgcgcattgtccgtggatggccatgaatggccttcaggccatcgcagaggcattagaacaggaaggaagcaatcacgaggttcatgttgatgaaaggctgcgagagagggcgctggtgccgctcaatcgtatgctggattttgcggctacactacgtggataacgaataataaggcgtaacgttacgctttgggggaaagatggatttttttagtgtgcagaatatcctggtacatataccaataggggcaggcggttatgatctctcatggatcgaagcggtaggcacgatcgccgggttgctgtgtattggccttgccagtctggagaagatcagcaactacttctttggcctgatcaacgtcaccttgtttggcattattttctttcagattcagctgtatgccagcctgctattacaggtgtttttctttgccgcgaatatttacggttggtatgcgtggtcgcgacaaaccagtcagaacgaggcggagttgaaaattcgctggttgccattgccgaaggcactcagctggttggcggtttgcgttgtttcgattggtctgatgacggtatttatcaatccggtgtttgcatttttgacccgcgtggcagtcatgatcatgcaagcattaggattacaggttgtgatgcctgaactgcaaccggacgctttcccgttctgggattcatgcatgatggtgttatctatcgtggcaatgattctgatgacgcgtaagtatgtggaaaactggctgttgtgggtgattattaacgtgattagcgtcgttatttttgcacttcagggcgtttacgccatgtctctggagtacatcatcctgacctttattgcgctcaacggcagccggatgtggatcaacagcgcacgtgaaagaggctcacgcgcgctgtcccattaatggtgatgatgtgaatggccagacaccccttcattcaggtggcagtctggcccatgacaaggttgatattccatctgaatggtggcgtgctcaatctgatagtgatccatcaggtagtgttggatctgatccaacaaggcatcgtgatcgtgtggcgggatcacctgcacatgcaacgtcatcaccggcttctcgcctaccatccatacatgtacatggtgcacattgcggacttccgggatttcccggcacatacgacgcttcagttcagcgatatccagcgataccggtgcaccttcaagtaattcattcacgctatctttcaacagtcgccacgcgctacgcagaaccagaagcgacaccagtatcgagagaatggggtcagcaggtgtccagccagtccagataataatcaacgcggcaataatagccccaaccgaacccagcaggtccccgagcacatgcagtgccgctgctcgtacgttgaggtttttctcttcgctgccgtgatgaagtaaccagaaagaaagtatatttgccagcaacccagccacggcaattgccatcatcatgccgccctcgaccggacgcggcgtgcggaagcgttctatcgcctcccagacaatcaaaatggtaattaccacgagggctatggcattcacaaacgccgcgagcgtggtcagtcttagccaaccgaaagtgtggcgaatggtgggaggacgacgtgaaaattgcacggcgagtagggcgaaaagcagggcggcagtatcggtcaacatatgacccgcatcggccagcaatgccagagaaccagaaagaaaaccaccaacgacttctaccagcataaacccggcagtcacgccgaaagcatacaacaagcgacgagcattattatcttctggcaggtgtgaggacgtgtgtgagtgtgagtgcgccatgacgagtcatcccttaattattctcacttaactttatgacatcatactgcttttagaagtgaaaaattaaaagggagagactccgctctcccattattggctattttgcagggttactgcgtggtaccgtcggttttggtatcgacatcattattgatgccatcaccggtttgtacctttttattgatatccggacagcgaccatctttgcacatggtgttcttgtgctcttcatctttggtcattccgtcattgttcattgaagaaccatccgaatgcagcattgtgccgccagaaccggtatttaccccgttattgtcgacgttatttggcgcgacattttcacgggcgtcaggggctacctggcccgcatcagctgcggcgtttgcctggccgttattagtttgcgctccgctatcggcagccagtgcggcaccgctggcaaggcttagagtggcagtcagaaataatgtggccagttttgtcattttcataggatgctcctgttatggtcgttatgtcggataacctcttccaacagtgcatttgcaggtgaatataaggcattggtttaagatttcagccaggttatgaaacgcagcagagaatcttgaaataattaacaaacaaaggagttacagttagaaattgtaggagagatctcgtttttcgcgacaatctggcgtttttcttgctaattccaggattaatccgttcatagtgtaaaaccccgtttacacattctgacggaagatatagattggaagtattgcattcactaagataagtatggcaacactggaacagacatgaattatcagaacgacgatttacgcatcaaagaaatcaaagagttacttcctcctgtcgcattgctggaaaaattccccgctactgaaaatgccgcgaatacggttgcccatgcccgaaaagcgatccataagatcctgaaaggtaatgatgatcgcctgttggttgtgattggcccatgctcaattcatgatcctgtcgcggcaaaagagtatgccactcgcttgctggcgctgcgtgaagagctgaaagatgagctggaaatcgtaatgcgcgtctattttgaaaagccgcgtaccacggtgggctggaaagggctgattaacgatccgcatatggataatagcttccagatcaacgacggtctgcgtatagcccgtaaattgctgcttgatattaacgacagcggtctgccagcggcaggtgagtttctcgatatgatcaccccacaatatctcgctgacctgatgagctggggcgcaattggcgcacgtaccaccgaatcgcaggtgcaccgcgaactggcatcagggctttcttgtccggtcggcttcaaaaatggcaccgacggtacgattaaagtggctatcgatgccattaatgccgccggtgcgccgcactgcttcctgtccgtaacgaaatgggggcattcggcgattgtgaataccagcggtaacggcgattgccatatcattctgcgcggcggtaaagagcctaactacagcgcgaagcacgttgctgaagtgaaagaagggctgaacaaagcaggcctgccagcacaggtgatgatcgatttcagccatgctaactcgtccaaacaattcaaaaagcagatggatgtttgtgctgacgtttgccagcagattgccggtggcgaaaaggccattattggcgtgatggtggaaagccatctggtggaaggcaatcagagcctcgagagcggggagccgctggcctacggtaagagcatcaccgatgcctgcatcggctgggaagataccgatgctctgttacgtcaactggcgaatgcagtaaaagcgcgtcgcgggtaaggtttaattgtcggatgcgccgtcagagtggcgtatccgatgaatcaccacaggcctgataagtcgcgcagcgtcgcatcaggcaatgtgctccattgttagcaacaaaaaagccgactcacttgcagtcggctttctcattttaaacgaatgacgtttacttcgctttaccctggtttgcaaccgccgctgctttcgctgcgatctcgtcagcattacccagataatagcgtttcagcggtttgaaattctcgtcgaactcatacaccagcggcacgccagtcgggatattaagctcaagaatctcttcttcgctcatgttatcaagatatttcaccagcgcacgtaaagagttaccgtgtgcagcgatgatcacgcgctcaccgctcttcatacgcggcagaatagtttcattccagtaagggatcacgcggtcaatggtcagcgccaggctttccgtcagcggcagttctttctcgctcagtttcgcgtaacgcggatcgtgacccggataacgctcatcatctttagtcagttccggcggagtcactgcaaaaccacgacgccactgtttcacctgctcgtcgccatacttttcagcagtttccgctttgttcagaccctgcaacgcaccgtagtgacgttcgttcagtttccaggatttctcaacgggcagccatgcctgatccagttcgtccagcacattccacagggtatggatagcgcgtttcagcacagaagtgtaagcaaagtcaaagctgtaaccttcctctttcagcagcttacctgctgcttttgcttcgcttacgcctttctcagacagatccacgtcgtaccaaccggtgaaacggttttctttgttccactgactttcgccatgacgaaccagaaccagcttagttacagccatatacttactcctcaaatcatcttttaatgataataattctcattatattgccgcgacgaagcaacagcaatgcttacgcataaccatagcgaaaatagtggcgcagtgtaaggttgttgtgaatattgagttgcaaatatgtcggtgtttgctggtgatttgaacaatatgagataaagccctcatgacgagggcgtaacattactcagcaataaactgatattccgtcaggctggaatactcttcgccaggacgcaggaagcagtccggttgcggccattcagggtggttcgggctgtccggtagaaactcgctttccagagccagcccttgccagtcggcgtaaggttcggttccccgcgacggtgtgccgccgaggaagttgccggagtagaattgcagagccggagcggtggtgtagaccttcagctgcaatttttcatctgctgaccagacatgcgccgccactttcttgccatcgcctttggcctgtaacaagaatgcgtgatcgtaacctttcactttgcgctgatcgtcgtcggcaagaaactcactggcgatgattttggcgctgcggaaatcaaaagacgttccggcgacagatttcaggccgtcgtgcggaatgccgccttcatcaaccggcagatattcgtccgccagaatctgcaacttgtgattgcgcacgtcagactgctcgccgtcaagattgaaatagacgtgattagtcatattcaccgggcaaggtttatcaactgtggcgcgataagtaatggagatacggttatcgtcggtcagacgatattgcaccgtcgcgccgagattacccgggaagccctgatcaccatcatctgaactcagggcaaacagcacctgacgatcgttctggttcacaatctgccagcgacgtttgtcgaacccttccggcccgccgtgcagctggttaacgccctgacttggcgaaagcgtcacggtttcaccgtcaaaggtataacggctattggcgatacggttggcataacgaccaatagaggcccccagaaacgcggcctgatcctgatagcattccgggctggcacagccgagcagcgcctcgcggacgctgccatcggaaagcggaatacgggcggaaagtaaagtcgcaccccagtccatcagcgtgactaccatccctgcgttgttacgcaaagttaacagtcggtacggctgaccatcgggtgccagtgcgggagtttcgttcagcactgtcctgctccttgtgatggtttacaaacgtaaaaagtctctttaatacctgtttttgcttcatattgttcagcgacagcttgctgtacggcaggcaccagctcttccgggatcagcgcgacgatacagccgccaaatccgccgccggtcatgcgtacgccacctttgtcgccaatcacagctttgacgatttctaccagagtgtcaatttgcggcacggtgatttcgaaatcatcgcgcatagaggcatgagactccgccatcaactcgcccatacgtttcaggtcgccttgctccagcgcgctggcagcttcaacggtgcgggcgttttcagtcagtatatgacgcacgcgttttgccacgatcgggtccagttcatgcgcaacagcgttgaactcttcaatggtgacatcacgcagggctggctgctggaagaaacgcgcaccggtttcgcactgttcacgacgggtgttgtattcgctgccaaccagggtacgtttgaagttactgttgatgatgacgacagccacacctttgggcatggaaactgctttggtccccagtgagcggcaatcgatcagcaaggcatgatctttcttgccgagcgcggaaattagctgatccatgatcccgcagttacagcctacaaactggttttctgcttcctgaccgttaagcgcgatttgtgcgccgtccagcggcagatgataaagctgctgcaatacggttccgaccgcgacttccagtgaagcggaagaacttaacccggcaccctgcggcacattgccgctgatcaccatgtccacgccgccgaagctgttgttacgcagttgcagatgtttcaccacgccacgaacgtagttagcccattgatagttttcatgtgcgacaatgggcgcatcgagggaaaactcgtcgagctgattttcataatcggctgccatcacgcgaactttacggtcatcgcgtggtgcacaactgatcacggtttgataatcaatcgcgcagggcagaacgaaaccgtcgttgtagtcggtgtgttcaccaatcaaattcacgcggccaggcgcctgaatggtgtgagtggcagggtagccaaatgcgttggcaaacagagattgtgttttttctttcagactcatttcttacactccggattcgcgaaaatggatatcgctgactgcgcgcaaacgctctgctgcctgttctgcggtcaggtctcgctgggtctctgccagcatttcataaccaaccataaatttacgtacggtggcggagcgcagcagaggcggataaaagtgcgcgtgcagctgccagtgttgattctcttcgccattaaatggcgcgccgtgccagcccatagagtaggggaaggagcactggaagaggttgtcataacgactggtcagctttttcaacgccagcgccagatcgctgcgctgggcgtcggtcaaatcggtgatccgtaaaacgtgggctttgggcagcagtagcgtttcgaacggccaggcagcccagtaaggcacgacggctaaccagtgttcggtttcgacaacggtacggctaccgtctgccagctcgcgctgaacataatccaccagcattggtgatttctgttcggcaaaatattctttttgcaggcggtcttcgcgctcagcttcgttaggcaggaagctatttgcccaaatctgaccgtgcggatgcgggttagagcagcccatcgccgcgcctttgttttcaaaaacctgcacccatgggtacgttttccccagttctgcggtttgctcctgccaggttttgacgatttccgtcaatgctgcaacgctgagctctggcagcgttttactgtgatccggtgaaaagcagatcacccggctggtgccgcgcgcgctctggcaacgcatcagcggatcgtgactttctggcgcatctggcgtgtcagacatcaaagccgcaaagtcattagtgaaaacgtaagtcccggtgtaatcggggtttttatcgcctgtcacccgcacattacctgcgcagaggaagcaatctggatcgtgcgcaggtaacacctgtttggctggcgtttcctgcgccccctgccaggggcgcttagcgcggtgcggtgaaaccagaatccattgcccggtgagcgggttgtagcggcgatgtggatgatcaacgggattaaattgcgtcatggtcgttccttaatcgggatatccctgtggatggcgtgactgccagtgccaggtgtcctgcgccatttcatcgagtgtgcgcgttacgcgccagttcagttcacggtcggctttgctggcgtccgcccagtaggccggaaggtcgccctcgcgacgcggtgcaaaatgataattaaccggtttgccgcaggctttgctgaaggcattaaccacgtccagcacgctgttgcctacgccagcgccgaggttgtagatgtgtacgcctggcttgttcgccagtttttccatcgccacgacgtgaccgtccgccagatccattacgtggatgtaatcgcgtacgccagtaccatcttcggtcggataatcgttaccaaaaatcgccagcgagtcgcgacggcctacagcaacctgggcgatgtatggcatcaggttattcggaatgccttgcggatcttcgcccatatcgcccgacggatgcgcgccaaccgggttgaagtagcgcagcagggcaatgctccagtccggctgggctttttgcagatcggtgaggatctgttccaccatcagcttgcttttgccgtaagggctttgcggtgtgccggtcgggaagctttcaacgtatggaattttgggctgatcgccataaacggtggcggaggagctaaaaataaagtttttgacgttagcggcgcgcatggcgctaatcaggcgcagagtgccgttgacattgttgtcgtaatattccagcggtttttgtaccgattcgcccacggctttcagcccggcgaagtggatcacggtgtcgatagcgtgatcgtgcaggatctcggtcatcaacgcttcgttacgaatatcgccttcaacaaacgttggatgtttgccgcctaaacgctcgataacaggcagtacgctgcgcttactgttacagaggttatcaagaatgatgacatcatgaccgttttgcagtaattgcacacaggtatgacttccaatgtaaccgctaccaccggtaaccagaactctcataattcgctccattaggcttatggtatgaaataaccatagcataacaaagatgcgaaaagtgtgacatggaataaattagtggaatcgtttacacaagaatttagccgttttttatgcgcgattaagtgattataaaacagagggtttatgaatgattgcgctttttatctgaaaaaagacgcggtttcatgcctgcatgcgtcgaaccgttggccggagagggtgctaaggccgcctccggcaaggtcagcactaccgactcaatatatttttgtcagcacatagcgatagagtccaccgtccggcacgaactcaagacgatgggtaatacaggcaggcgcatcttcagcgtggtgcgaaacaaacaacaattgcgtttcaccttcgctaatcagcacatcaacaaaacggcggataagctggcgattcagcggatcaagcccctgtagtggttcatcgagaataagcaacgtcggatgtttcaccagtgcgcggacaatcagcgccagacgctgctgtccccaggaaagactatggaacggagcgtcagccgtgcgtttatcaatgccgagaatatccagccactgctgcaccagtttttgctggcgatccgaaacggcctgataaatgccaatcgaatcaaaatagccagaaagaatcacattacgcacggtagtgctgacccggtaatccagatgcaaactactgctgacgtaaccgatatgctttttgatatcccagatggtttcgccgctgccgcgacgtcgtccgaaaagcgtcaaatcgttgctgtaaccttgcggatgatcgccagtaaccaggcttaataacgtcgattttcctgcaccatttggcccgacaatttgccagtgttcgcctggattcacctgccagctaaggttattaagaatggggcgatcgttataagaaaccacgccattgttcagcacaatgcgcggttcgttggcgggtaaggcgtgacgtgctgaaggttcatccggctccggcagttgcacaccttcaagctgttcactatgcgccagttgcgcgacgagtgcttgttggagcagttcctctttagcgccagtttccgctaacgtgcaatccgccagcacgccagcaaactggacaaactccgggatctcatcgaagcgattgagcaccagtaccagagtaataccggactgatgtaacgaggcgagtcgctcagccagctgctgacgtgaggcaacatccaggccatcgaacggctcatcaagaatcaacaagtcaggctccgacatcagcgcctgacacagcagggtttttcgcgtctcgccagtggaaaggtatttaaagcgtcggtcgaggagggcggtaataccgaactgctgcgccagttgcatgcaacgcggtgcatcctttacttcatcctgaatgatctcagccgtagtgcgtccggtgtcatcttcgccagggccgagcatatcggtgttattccgctgccattcgtcgctgacgagtttttgcaattgctcgaaggagagacgagtgatgtgggaaaactggctttgccgttcacctttcaaaagcggaagttcccccgccagcgcgcgggccagggccgatttcccgcttccattcgaaccgacaaacgcccaactatcacccgcgtttaacgttagctgaggcaattgcagcgtttttgtgtcgctaagacgaaacgtgccttgcaaaatttgcaacgatgacattttatatcccactttgtgcagcgattactgacagggatacgtgtttcataacaaattgtcaacacgcttagcacagcgtggcgataatcacgctgtcggcattaaagtaggccgtgacattctgtccttgctgaagagaagtcgcttcatttaccggcactgtggcgcacagtgtttgcccgtcgggtagcgccattaatacttcgcactgctctgcgccgcgctcaatatgactaataatacccggtaattggttgtcagcgttttgcgcgaccgcctcgtcctgagtaatacctacccacggcgcttttagcaatatcaacacttctttgccttcatccagccccagacgcgcgccgctttgtgcggtaattgcgactttcaggcgtgtttttccgtcagccagtaagacatcaacatgctgttgaacgtcatcatgatcgcgggcggtgatggtaccgaaccactggttacgggcgctggtttgcagtgaaaaacgtgagatcgcggccagcaggctgttcagcggcagggcgtcatcgtcacttaacacatcaaaggctttttgctggatttgcgccagtaagtcatagagctgaatcagtcgctgaccatagcgggtcagtactgcgccgccgccacctttaccgcctgttgcgcgctcgaccagaatatgctcacttaactgattcatctcgttaatggcatcccaggcgcttttatagctaataccggcatctttcgctccctggctaatggaaccggaaagcgcaatgtgttttagtagcgaaatgcggcgcgggtcggcgaataatttttgttggagcttaagggtgagaaggatttcggcctgcataacaatgtcctggcaaaagtcttattgtgacggaaaacgaacgccacgcaaagctgaccgcacaaaaggggagtgcttttctgtgcttagcggttagaatagtctcatgactatatctggagttgaccatgttagagttattaaaaagtctggtattcgccgtaatcatggtacctgtcgtgatggccatcatcctgggtctgatttacggtcttggtgaagtattcaacatcttttctggtgttggtaaaaaagaccagcccggacaaaatcattgattccctgaatgcccgcttagtcgggcattttctttttctcaacttcctgcttttcctgccgatattttttcttatctacctcacaaaggttagcaataactgctgggaaaattccgagttagtcgttatattgtcgcctacataacgttacattaaggggttaccaatggctcgtaaatggttgaacttgtttgccggggcggcactctctttcgctgttgctggcaatgcactggcagatgaagggaaaatcacggtgttcgccgccgcatcactgactaacgcaatgcaggacattgctacgcagtttaaaaaagagaaaggcgtggatgtggtttcttctttcgcttcgtcatctactctcgcccgtcagattgaagcgggtgcgcctgcggatctgtttatttctgccgatcagaaatggatggattatgcggttgataaaaaagcgatcgatacagctacgcgtcagacactgctcggcaatagcctggtcgttgtagcaccgaaagccagcgtgcagaaagatttcaccatcgacagcaaaaccaactggacttcactgctgaatggcggtcgcctggcggttggcgatccggaacatgttcccgctggcatttatgcaaaagaagcactgcaaaaactgggcgcatgggatacgctctctccgaaactggccccagcggaagatgttcgtggggcgctggcgctggtcgaacgtaacgaagcgcctctgggcattgtctacggttctgacgcagttgccagcaaaggggtaaaagtggttgccaccttcccggaagattcacataaaaaagtggaatatccggttgctgttgtggaagggcataacaatgcgacagtgaaagcattttatgattatctgaagggaccgcaggcagcggaaatctttaaacgttacggatttacaatcaagtaatgatactgaccgatccagaatggcaggcagttttattaagcctgaaagtttcttccctggctgtgctgtttagcctgccgtttgggatcttttttgcctggttactggtgcgttgcacgtttccgggcaaagctctgctcgacagcgtactgcatctaccgctggtgttaccgcccgtggtcgtcggttacttattattagtttcgatgggacggcgcggatttatcggtgaacgtctgtatgactggtttggtattaccttcgcctttagctggcgcggcgcggttctcgctgccgccgtcatgtcgtttccgctgatggtgcgggcaattcgtctggcgctggaaggggttgatgtcaaactggaacaggccgcaagaacactgggggccgggcgctggcgcgttttctttactatcacgttaccgctgaccttaccgggaattattgttggtacggtactggcttttgctcgttctctcggtgagtttggtgcaaccatcacctttgtgtcgaacattcctggtgaaacgcgaaccattccttctgccatgtataccctgatccagacccccggcggggaaagtggagcggcgagactgtgcattatttctattgcgctggcgatgatctccctgttgatttcagaatggctggccagaatcagccgtgaacgggcggggcgctaatcatgctggaactgaatttttcccagacgttgggcaaccattgcctgactattaatgaaacgctgcccgccaatggcatcactgctatctttggcgtctccggtgccggaaaaacttcgctgattaacgccatcagtggactgacgcgcccgcaaaaagggcggattgtcctcaatgggcgggtactaaatgatgccgaaaaaggtatctgcctgacgccggaaaagcgtcgcgttggctatgtttttcaggatgcgcggctgttcccgcattacaaagtgcgtggcaatctgcgctacggcatgtcgaaaagtatggtcgatcagttcgataagctggtggcgcttttaggcattgaaccgttgcttgaccgtttaccaggcagcctgtccggaggcgaaaaacagcgcgtggcgattggtcgggctttgctgacagcaccggaattgctgttgctggatgaaccgctggcgtcactggatattccgcgtaaacgcgaactgttgccttatctgcaacggctgacacgggaaatcaacattccgatgttgtatgtcagccattcgctggatgagatcctccatctggcagacagagtgatggtactggaaaacggtcaggtgaaagcctttggcgcgctggaggaagtgtggggcagtagcgtgatgaatccgtggctgccgaaagagcaacaaagtagcattctgaaagtgacggtgcttgagcatcatccgcattacgcgatgaccgcgctggcgctgggcgatcagcatttgtgggtcaataagctggacgaaccgctgcaagctgcgctacgtatccgcattcaggcttccgatgtttctctggttttacaaccgccgcagcaaaccagcattcgtaacgtattgcgggcaaaagttgttaatagttatgacgacaacggccaggtggaagtggaactggaagtcggcggtaaaacgctgtgggcgcgtatcagcccgtgggccagggatgaactggcgatcaaacctggcctgtggctgtacgcgcaaattaaaagtgtgtcgataaccgcctgattaaatcaggtggctataaatgaactgggcaatgctgtcggtggtgttatcaccaatcacaatgttggcgcgcgcttttaccgcgtcatcggcgttgcccatcgccacgcctgtaccagcggcttccagcatactgatatcattaaagttatcgccgaatgccacgacgttttccatcgaccaaccttgcgcctcaacccatttcgtcaaacgtttacctttgctgttgccgccgcgtgcaatatcaacctgatcgtgccaggaccattcacactccagtcccagttcatgttcgacatgcttaccaaaatgctgcaattgcggcaggtcatcgtgcgtcagggcgaacttccatacggcgttaacttgttgcgccgtttcagccagagaagcgacttgtgtgaaagtcggacgctgttccggcggcagggtttgcgcccagttagatgtgcgaatgacatgcccggtcgggtgctcatagaccattgcatcatcgacatacatcagaccgtgaatgtggtgttcattcagcatctcaatgagttgcagggctttaataacgggcattgggtccgcttccagcacggtttttgcatgataatcatacaaataggtgccattacagcaaatagcaggtgtatccagcgccagcgcctgataaaaaggatgaatagcgacgtgatggcgacctgtgacgatgattaattgatagcctgcttcgcgagcgcgggccagggcttctatcgatgaaggaagcagggtctttttcggggtcaataaggtgccgtctaagtcgagagcaatcacgcgtgtggtcatggcgtattccagattaaggttaagaattttcgtctgcgcgaatggtacaccgataccactatcggacaaaattctgcgttttaattcagcattcaccgccaaaagcgactaattttagctgttacagtcagttgctaaatgcaaaggagcattcatgaagcaaacagtttatatcgccagccctgagagccagcaaattcacgtctggaatctgaatcatgaaggcgcactgacgctgacacaggttgtcgatgtgccggggcaggtgcagccgatggtggtcagcccggacaaacgttatctctatgttggtgttcgccctgagtttcgcgtcctggcgtatcgtatcgccccggacgatggcgcactgacctttgccgcagagtctgcgctgccgggtagtccgacgcatatttccaccgatcaccaggggcagtttgtctttgtaggttcttacaatgcgggtaacgtgagcgtaacgcgtctggaagatggcctgccagtgggcgtcgtcgatgtggtcgaggggctggacggttgccattccgccaatatctcaccggacaaccgtacgctgtgggttccggcattaaagcaggatcgcatttgcctgtttacggtcagcgatgatggtcatctcgtggcgcaggaccctgcggaagtgaccaccgttgaaggggccggcccgcgtcatatggtattccatccaaacgaacaatatgcgtattgcgtcaatgagttaaacagctcagtggatgtctgggaactgaaagatccgcacggtaatatcgaatgtgtccagacgctggatatgatgccggaaaacttctccgacacccgttgggcggctgatattcatatcaccccggatggtcgccatttatacgcctgcgaccgtaccgccagcctgattaccgttttcagcgtttcggaagatggcagcgtgttgagtaaagaaggcttccagccaacggaaacccagccgcgcggcttcaatgttgatcacagcggcaagtatctgattgccgccgggcaaaaatctcaccacatctcggtatacgaaattgttggcgagcaggggctactgcatgaaaaaggccgctatgcggtcgggcagggaccaatgtgggtggtggttaacgcacactaaccgctgatttacccggcgcagtctctcctgcgccggtgtattaacctatctcctgtaacgcgtgtctctggcgttcgacgatattggtccacaaattgtctttatcgtcagtccataaattaatcagcaaggcaaaaaagcgttctgctgctggagaaagtacggcatctttacggcgaattattcccaatgttcgacgtataacgggttccaccaatgggataccaataatcgaagaatagggcgcatgaggcattgccaggccaggaagcgccgaaatccccagtcccgcctccaccagtcctaatgacgtcgaaagatgacgcacttcgtaaaaccagtccagcttccagggcttgtcggccagctgttgttctatcaacagtcggttgccgctggaggagcgtacgccaatcattttgtaacccactaactcctgccattctacaagctgctttttggccaatggatggtcacgccgacaggccagcacgaacggctcgttgaccagtggggtaaaatcaatggatgaatttgtgacgttgttcatgtttatgccaaagtctgattcgttacacagcaccgattccatgcaattattcgtgccttgttccagaatccgcactttaatattgggatacagctcattaaatttaccgattgccagcggtaaaaaataaaatactgcggtcggaatacacgctaacgtcaccataccacgatgataagcattcatatcacgaatattaaaaagcgtttcatcgaatttctttattaattcccgcgcctccgggagcaacctttttcctgcttttgttaacgtaaccttgcgagttgtacgctcaaatagttgaacatgtaaatcttcctccatcttttttattcttcgcgttaatgcaggttgcgtaatattgagtaatttagcggcattgttaaacgaactggactctgccagtatgacaaatgccttcatacttgataattcatgcttcattattactccggaaaatggaagcgacgattttgggtggctggccgttaaaaattttaactgcatttagccaacttaaattaatgaaaaaatgttattaatcgttgagctaaagtcattagagatgctttgcccttaatgtaaccatatcgcaataagttatgtttttaaattgagggcattattatgaaaaaaataccctgcgtgatgatgcgaggtggaacctcgaggggcgcgttcctgttagcggaacatttacccgaagatcaaacgcagcgcgataaaatattgatggcaattatgggttccggtaacgatctggaaattgacggtattggcggcggtaatccactgaccagtaaagtcgccattattagccgttccagcgatccgcgtgctgatgtcgattatctgtttgcgcaggtaatcgttcatgagcaacgtgtcgataccacgcctaactgcggcaatatgctgtctggtgttggggcattcgccattgaaaatggtttgattgcagcgacttcgccagttactcgcgtacgtatccgcaacgtcaatacgggtacgttcatcgaagctgatgtgcaaacgccaaatggtgttgtcgagtacgagggtagcgccagaattgacggcgtaccgggtactgccgcaccggttgcgctcactttcctgaatgccgctggaaccaaaaccggaaaagttttcccgactgataatcagattgattattttgacgatgtcccggtgacctgtatcgatatggcgatgccagtcgtcattattccggctgaatatctgggaaaaacaggttatgaattaccggcggaactggatgccgacaaagcattattagcccgcattgaatctatccgtctacaagcgggtaaagcaatgggcttaggtgatgtcagtaatatggttatccctaaacctgtgcttatttctccagcgcagaaaggcggggcaattaatgtgcgttattttatgccgcattcttgccatcgcgcgctggcgataaccggtgctattgctatttccagtagttgtgcattggaaggcaccgtcacccgacaaatcgtcccttctgtaggatacggcaatatcaatattgaacaccccagtggtgcgctcgacgttcatttaagtaatgaaggtcaggatgccacgacgttacgcgcatctgttattcggacgaccagaaaaatattttccggtgaagtttatcttccctgaaaaaattcgttgtcaggataaggacaatcaataaaggacttctgtatgagtcatacagaaagaacaggattttaaatgaataagaaatcgttatggaagctaattctgatattagcgatcccatgtattattggttttatgccagctccggcaggattaagcgaactggcgtgggtgctttttggtatttacctggcggccattgtggggctggttatcaagcctttcccggaacctgtcgtactgttaattgccgttgctgcctcaatggtggtggtcggtaacttatccgacggtgcgtttaaaaccaccgccgtattaagcggttactcttcaggtaccacctggctggtgttctcggcgtttaccttaagcgccgcatttgtgaccaccggtttaggtaaacgtattgcctatctgctgattggtaaaatcggtaacaccacgctgggtctgggttacgttacggtattcctcgatctggtactggctccggcaacaccgtctaacaccgcgcgtgcgggcggcattgtgttaccgatcatcaacagcgtggcggtggctttggggtccgaaccggaaaaaagtccgcgtcgtgtcggacattacctgatgatgtccatttacatggtcaccaaaaccaccagctatatgttctttaccgcaatggcggggaacattctggcgctgaaaatgatcaacgacattctgcacctgcaaattagctggggtggatgggcgctggcagccggattgccgggcatcattatgctgctggtcaccccgctggtgatttacaccatgtatccaccagaaattaagaaggtggataacaaaaccatcgctaaagcgggccttgccgaactaggaccgatgaaaatccgcgaaaaaatgctgctcggtgtctttgtgctggcgctgctgggctggattttcagtaagtctctgggggttgatgaatccaccgtggcaatcgttgttatggcaaccatgctgctgctgggtatcgttacctgggaagacgtggttaaaaataaaggcggctggaataccttaatctggtacggcggtattatcggcttaagctccttattatcgaaagttaaattcttcgaatggttagctgaagtctttaaaaataacctggcatttgatggtcacggtaacgttgctttcttcgttattattttcctcagcattatcgtgcgttatttcttcgcttccggtagtgcctatatcgttgctatgttaccggtatttgccatgctggcgaacgtctccggcgcaccgttaatgttaaccgcgctggcactgttgttctccaactcctatggcggcatggttactcactatggcggcgcggcaggtccggtcatctttggcgtgggttataacgatattaaatcctggtggttggtcggtgcggtactgacgatattaaccttcctggtgcatatcaccctcggcgtgtggtggtggaatatgctgatcggctggaacatgctgtaaatattctcgtcatacttcaagttgcatgtgctgcgtctgcgttcgctcaccccagtcacttacttatgtaagctcctggggattcactcgcttgtcgccttcctgcaactcgaattatttagagtatatccatttattatctttctgcgcacttcacggtgcgcagatatctggagcatttgatgatcaagttatctgaaaaaggcgtgtttctcgccagtaataacgaaataattgccgaagaacatttcaccggcgaaattaaaaaagaagaagccaaaaaaggcactattgcctggtctattctctcttcgcataatacgtccggaaatatggataaacttaaaattaagtttgattcattagcctctcacgatattacctttgttggtattgtacagaccgctaaagcgtccggtatggaacgtttcccgctgccgtatgtgctgaccaactgccataactcactctgcgccgtcggcggcactattaacggtgatgaccatgtttttggtttatcggcggcccagcgttatggcggtatttttgtgcctccgcatattgcggtcatccatcaatatatgcgtgagatgatggcaggcggcggcaaaatgatcctcgggtcagacagccacacccgttacggtgcattagggacaatggcagtcggtgagggcggcggtgagttggtaaaacagctgcttaatgacacctgggatatcgactatccgggcgtggttgcggtgcatctgaccggaaaacctgcgccgtatgtggggccacaggatgtggcgctggctatcattggcgcggtgttcaaaaacggttacgtcaaaaacaaagtcatggagttcgttggaccgggcgttagcgcgctctctaccgatttccgtaacagcgttgacgtgatgaccactgaaacgacctgtttaagttctgtctggcaaaccgatgaagaagtccataactggctggcgctgcacggtcgcggccaggattactgccagcttaaccctcaaccgatggcgtactacgatggctgcatcagcgttgatttaagcgccatcaaaccaatgattgcgctgccgttccacccgagcaacgtgtatgaaatcgacacactgaaccagaacctgaccgacattctgcgtgagattgaaattgagtccgaacgcgtggcgcacggtaaagccaaactctcgctgctggataaagtggaaaatggtcgcctgaaagtgcagcaggggattatcgcgggctgttctggcggtaactacgaaaacgtcatcgcggcggcgaatgcactgcgcggtcaatcctgtggcaatgacaccttctcgctggcagtttacccgtcatcacagccggtgtttatggatctcgccaaaaaaggtgtggtagcagatttgattggcgcaggcgcaatcatcagaaccgcgttctgcggcccatgctttggcgcgggcgatacgccaatcaacaacggtttgagtattcgccacaccacgcgtaacttcccgaaccgcgaaggctctaagccagctaatgggcagatgtcagcggtggcgttgatggacgctcgttctatcgctgcgactgcggcaaacggtggctatttaacctctgccagcgaacttgattgctgggacaacgtgccggagtacgccttcgatgtaacgccgtataaaaaccgtgtttatcagggctttgtgaaaggggcaactcagcaaccgctgatttacgggccgaacattaaagactggccggaattgggtgcgctgactgacaatatcgtcctgaaagtgtgctcgaagatcctcgacgaagtgaccaccaccgacgaactgattccttccggtgaaacctcttcttatcgttcaaatccgattggtctggcggagtttaccctgtctcgccgcgatcccggttatgttagcagaagtaaagcgactgctgagctggaaaatcagcgtctggcggggaatgtcagcgagctgacagaggtgtttgcgcgcattaagcagattgctggtcaggagcatattgatccgctgcaaactgaaattggcagcatggtctatgcggtgaaaccaggcgatggttctgcgcgtgaacaggcggcgagctgccagcgtgtgattggcggtctggcgaatattgccgaggagtacgcgactaaacgctatcgttctaacgtcatcaactgggggatgttaccgctgcaaatggcggaagtaccaacctttgaagtgggggattacatttacatccctggcattaaagcggcgctggataatccgggtacgacgtttaaaggttatgtgatccatgaagatgcgccggtaacggaaattacgctctatatggaaagtctgactgctgaagagcgcgagattatcaaggcgggtagtttgattaacttcaataaaaaccgtcagatgtaaaaagcgccatgtgaatgtaggtcgcattcggcacttattgtcggatgcgatgcttgcgcatcttatccgacctacgaatcgcatcgaatctgtaggccagataaggcattttcgcagcatccggcacttattgtcggatgcgatgcttgcgcatcttatccgacctacaaatcgcatcgaaccgtaggccggataaggcgtttacgccgcatccggcaaatagttaattgctcttacttcttcgcctctgcaaccactttactacccacgccgcggttattgtattcccacatgcggttgtagttagtgtcattcagattgcgctgtatttcgtcgttatcatctacgctgccggtattacccgcaaacggacgattagagatcaccgcatcggcccacggtttagccgtgttaaaaccttcgttgatggcgctatcacggatcaccacctgaccgttggtattggcatcaacatccagcgagcggcccagttgcgccacaccatcaccgaaagcattgaaacggctgtttacggcgaggaaaccgtagtaaatgttggacagcgtagccggtgcaaacacatacgcttcttgctgagtacgtgagttcaccacgcggaattcggtgttatcgaacaccactgcgccgcgaccagaaacgatatccacatccccttcaatgtagctgttggtcaccagcgtacgcggctgacgattcgtttccagacggttctgcacaccgctgttggtgacaaagaaggtgttctgacgaccgagaatgttaacgttgttaatctgtacctggtcaccatcagtacgcagtgccaccgccggatggttacctgcatctacgctatcgcccagcgtgttttcgatggtcagattttgcagttgcaggccattgttttgtgaccagaagaccgcagagcagagaacaccgatactgtcgctgcgtttgctctggcagctatcgtacatataccacgctggtttacctggcatatatttgccgcgcgggttgacgtcgtgacgccagtcggcagggctcatgccaccatcaagggaaagcccaatcttcacatcaatcggtttttcacctgtaccgtacagagtaattccacccggagcggcagggacatataccgttccctgatactcaccaggcatcacggcaatatactggcgcttgttggtacgcttgataattgccgcatctaccgccgcctgaatcgtggtatgcgttacaccttgagtgcccgccgggccgacaacaaagtcaggttgcgcaggcagggtaatcggggaaggattccacgctgcagcacctggtgtcagggatgcaaaatagtgttgagcatcgaaattctgcgcttcttttgccgacagaatcgggcgagaagaggtaccaggcgcggtttgatcagaaggacgttgatcgggcggggttgagctacaggcggtcagcgtcacgccaaaagccaatgccagcgccagacgggaaactgaaaatgtgttcacaggttgctccgggctatgaaatagaaaaatgaatccgttgaagcctgcttttttatactaacttgagcgaaacgggaaggtaaaaagacaaaaagttgtttttaatacctttaagtgataccagatggcattgcgccatctggcagagtgattaactaaacatcgcagtaatcgaggcgcttgccagagagtggaaatgaacgttaaacccgaccatcgcgccgctggcaccttcatcgacatcaatacgttctatatccagcgcgtgaacggtaaaaatgtagcgatgagtttcgcctttcggcggtgctgcgccatcgtacccggttttaccaaagtcggtacgcgtctgcaaaacgccgtctggcattgctaccagaccagagccaaacccttgcggtaatacgcgggtatcagcgggtaagttaacaactacccagtgccaccagccggagccggttggcgcatccgggtcgtagcaggtgacaacaaaacttttcgttcccgcaggaacatcatcccacgccagatgcggtgaaatattatcgccatcgtaacccatgccgttaaagacatgacgatgcggcaatttatcgccatcgcgcagatcgttactgatgagtttcatgaaccctcctttcttgtttgcagaaagtgtagccagaaaccctcacgcggacttctcgttattggcaaaaaaatgtttcatcctgtaccgcgcggttaaccgctgcggtcagacgctgcaactgttgcgggagaataatatagggcggcatcaggtaaatcagtttgccaaaaggccggatccagacaccctgttcgacaaagaatttttgcagcgccgccatattcaccggatgagtggtttcgaccacgccaatggcccccagtacgcgcacatcggcaaccatttcggcatcacgggcgggggcaagttgctcgcgcagctgtacttcaatatccgccacctgttgctgccagtcgccagattcgagaatcgccaggctggcgtttgctgccgcgcaggccagcggattgcccataaaagttggcccatgcataaagcaaccggcttcaccgttactgatggtttctgcaacctcgcgcgtggtgagtgtggcggaaagggtcattgtgccgccggttaaggctttaccgaggcacaaaatgtccggcgcgatttctgcatgttcacaggcaaacagtttcccggtacgaccaaatccagtggcgatctcgtcggcaatcagcaagataccttcgcgatcgcatattttgcggattcgttttaaccattccggatggtacatgcgcatcccgcctgcgccctggacaatcggctcaatgatcaccgccgcgatttcatgacgatgcgccgccatcaggcgggcaaagcccaccatatcgcgctcatcccattcgccatccatgcggctttgcggggcgggagcaaacaggttttctggcaggtagcctttccacagactgtgcattgagttatccggatcgcacaccgacatcgcgccaaaggtatcgccatgataaccattgcggaaggtcagaaaacgctggcgcgcttcgcctttggcttgccagtactgcaacgccattttcatcgccacttccaccgctacggaaccggagtccgcgagaaaaacgcactccagcggttgcggcgtcatcgccaccagtttgcggcacagctcaatggctggcgcatgggtgataccgccaaacatcacatgcgacatggcatcaatttgcgacttcatcgccgcattaagctgcgggtgattgtagccgtggatcgccgcccaccaggacgacataccgtcaaccaggcgtctgccgtcagacaaaatcagctcgcaaccttcggcgctcaccaccggataaaccggcagaggggaggtcatggatgtgtatgggtgccagatatggcgttggtcaaaggcaagatcgtccgttgtcataatcgacttgtaaaccaaattgaaaagatttaggtttacaagtctacaccgaattaacaacaaaaaacacgttttggagaagccccatggctcaccgcccacgctggacattgtcgcaagtcacagaattatttgaaaaaccgttgctggatctgctgtttgaagcgcagcaggtgcatcgccagcatttcgatcctcgtcaggtgcaggtcagcacgttgctgtcgattaagaccggagcttgtccggaagattgcaaatactgcccgcaaagctcgcgctacaaaaccgggctggaagccgagcggttgatggaagttgaacaggtgctggagtcggcgcgcaaagcgaaagcggcaggatcgacgcgcttctgtatgggcgcggcgtggaagaatccccacgaacgcgatatgccgtacctggaacaaatggtgcagggggtaaaagcgatggggctggaggcgtgtatgacgctgggcacgttgagtgaatctcaggcgcagcgcctcgcgaacgccgggctggattactacaaccacaacctggacacctcgccggagttttacggcaatatcatcaccacacgcacttatcaggaacgcctcgatacgctggaaaaagtgcgcgatgccgggatcaaagtctgttctggcggcattgtgggcttaggcgaaacggtaaaagatcgcgccggattattgctgcaactggcaaacctgccgacgccgccggaaagcgtgccaatcaacatgctggtgaaggtgaaaggcacgccgcttgccgataacgatgatgtcgatgcctttgattttattcgcaccattgcggtcgcgcggatcatgatgccaacctcttacgtgcgcctttctgccggacgcgagcagatgaacgaacagactcaggcgatgtgctttatggcaggcgcaaactcgattttctacggttgcaaactgctgaccacgccgaatccggaagaagataaagacctgcaactgttccgcaaactggggctaaatccgcagcaaactgccgtgctggcaggggataacgaacaacagcaacgtcttgaacaggcgctgatgaccccggacaccgacgaatattacaacgcggcagcattatgagctggcaggagaaaatcaacgcggcgctcgatgcgcggcgtgctgccgatgccctgcgtcgccgttatccggtggcgcaaggagccggacgctggctggtggcggatgatcgccagtatctgaacttttccagtaacgattatttaggtttaagccatcatccgcaaattatccgtgcctggcagcagggggcggagcaatttggcatcggtagcggcggctccggtcacgtcagcggttatagcgtggtgcatcaggcactggaagaagagctggccgagtggcttggctattcgcgggcactgctgtttatctctggtttcgccgctaatcaggcagttattgccgcgatgatggcgaaagaggaccgtattgctgccgaccggcttagccatgcctcattgctggaagctgccagtttaagcccgtcgcagcttcgccgttttgctcataacgatgtcactcatttggcgcgattgcttgcttccccctgtccggggcagcaaatggtggtgacagaaggcgtgttcagcatggacggcgatagtgcgccactggcggaaatccagcaggtaacgcaacagcacaatggctggttgatggtcgatgatgcccacggcacgggcgttatcggggagcaggggcgcggcagctgctggctgcaaaaggtaaaaccagaattgctggtagtgacttttggcaaaggatttggcgtcagcggggcagcggtgctttgctccagtacggtggcggattatctgctgcaattcgcccgccaccttatctacagcaccagtatgccgcccgctcaggcgcaggcattacgtgcgtcgctggcggtcattcgcagtgatgagggtgatgcacggcgcgaaaaactggcggcactcattacgcgttttcgtgccggagtacaggatttgccgtttacgcttgctgattcatgcagcgccatccagccattgattgtcggtgataacagccgtgcgttacaactggcagaaaaactgcgtcagcaaggctgctgggtcacggcgattcgcccgccaaccgtacccgctggtactgcgcgactgcgcttaacgctaaccgctgcgcatgaaatgcaggatatcgaccgtctgctggaggtgctgcatggcaacggttaataaacaagccattgcagcggcatttggtcgggcagccgcacactatgagcaacatgcagatctacagcgccagagtgctgacgccttactggcaatgcttccacagcgtaaatacacccacgtactggacgcgggttgtggacctggctggatgagccgccactggcgggaacgtcacgcgcaggtgacggccttagatctctcgccgccaatgcttgttcaggcacgccagaaggatgccgcagaccattatctggcgggagatatcgaatccctgccgttagcgactgcgacgttcgatcttgcatggagcaatctcgcagtgcagtggtgcggtaatttatccacggcactccgcgagctgtatcgggtggtgcgccccaaaggcgtggtcgcgtttaccacgctggtgcagggatcgttacccgaactgcatcaggcgtggcaggcggtggacgagcgtccgcatgctaatcgctttttaccgccagatgaaatcgaacagtcgctgaacggcgtgcattatcaacatcatattcagcccatcacgctgtggtttgatgatgcgctcagtgccatgcgttcgctgaaaggcatcggtgccacgcatcttcatgaagggcgcgacccgcgaatattaacgcgttcgcagttgcagcgattgcaactggcctggccgcaacagcaggggcgatatcctctgacgtatcatctttttttgggagtgattgctcgtgagtaaacgttattttgtcaccggaacggataccgaagtggggaaaactgtcgccagttgtgcacttttacaagccgcaaaggcagcaggctaccggacggcaggttataaaccggtcgcctctggcagcgaaaagaccccggaaggtttacgcaatagcgacgcgctggcgttacagcgcaacagcagcctgcagctggattacgcaacagtaaatccttacaccttcgcagaacccacttcgccgcacatcatcagcgcgcaagagggcagaccgatagaatcattggtaatgagcgccggattacgcgcgcttgaacaacaggctgactgggtgttagtggaaggtgctggcggctggtttacgccgctttctgacactttcacttttgcagattgggtaacacaggaacaactgccggtgatactggtagttggtgtgaaactcggctgtattaatcacgcgatgttgactgcacaggtaatacaacacgccggactgactctggcgggttgggtggcgaacgatgttacgcctccgggaaaacgtcacgctgaatatatgaccacgctcacccgcatgattcccgcgccgctgctgggagagatcccctggcttgcagaaaatccagaaaatgcggcaaccggaaagtacataaaccttgccttgttgtagccattctgtatttggttaaattgcgagcgagatcgcgtcttcgattgactgcaatttaaccaattaaattctaaaataatcacgaaaaaaattttacttccgcctcatgcggcgaatgtgggaattgcccaggcggcgggggataggggctggagacagttatccactattcctgtggataaccatgtgtattagagttagaaaacacgaggcaagcgagagaatacgcggcttgcacgcgaattggcgttaaagacggctcaaagaaatatcttttattttttaactggttagataaatgcaatggcagtcactgaacaggcatctcttgccataaaactgtcatcactcatcttgacaaatgttaaaaaagccgttgctttggggataacccggtaaggccggagttttatctcgccacagagtaaattttgctcatgattgacagcggagtttacgctgtatcagaaatattatggtgatgaactgtttttttatccagtataatttgttggcataattaagtacgacgagtaaaattacatacctgcccgcccaactccttcaggtagcgactcatgagtaaaccgttcaaactgaattccgcttttaaaccttctggcgatcagccagaggcgattcgacgtctcgaagaggggctggaagatggcctggcgcaccagacgttacttggcgtgactggctcagggaaaaccttcaccattgccaatgtcattgctgaccttcagcgcccaaccatggtacttgcgcccaacaaaacgctggcggcccagctgtatggcgaaatgaaagagttcttcccggaaaacgcggtggaatatttcgtttcctactacgactactatcagccggaagcctatgtaccgagttccgacactttcattgagaaagatgcctcggttaacgaacatattgagcagatgcgtttgtccgccaccaaagcgatgctggagcggcgtgatgtggttgtggtggcgtctgtttccgcgatttatggtctgggcgatcctgatttatatctcaagatgatgctccatctcacggtcggtatgattatcgatcagcgcgcgattctgcgccgactggcggagctgcaatacgctcgtaatgatcaagcattccagcgtggtactttccgcgttcgtggcgaggtgatagatatcttcccggcagaatcggatgacattgcacttcgcgtggaactgtttgacgaggaagtggaacgattgtcgttatttgacccgctgaccgggcagattgtttccactattccacgttttaccatctacccgaaaacgcactacgtcacaccgcgcgagcgcatcgtacaggcgatggaggagatcaaagaagagctggccgccagacgcaaagtgctgttggaaaacaacaaactgctggaagagcagcggctgacccagcgtacccagtttgatctggagatgatgaacgagctgggctactgttcggggattgaaaactactcgcgcttcctctccggtcgtggaccgggtgagccaccgccgacgctgtttgattacctgcctgccgatgggctgctggtcgtcgatgaatctcacgtcaccattccacaaattggcggcatgtatcgcggtgaccgggcgcgtaaagagacactggtggagtacggcttccgcctgccatcagcgctggataaccgtccgcttaagtttgaagagttcgaagcattagcgccgcaaaccatctatgtttcggcgacgccgggtaattacgagctggaaaaatccggcggcgatgtggtggatcaggtggtgcgtccaaccggattgcttgacccgattatcgaagtgcggccggtggcgacacaggttgatgatcttctttcggagattcgtcagcgagcggcaattaacgaacgcgtactggtcaccacactgaccaagcggatggcggaagatcttaccgaatatctcgaagaacatggcgagcgcgtgcgttatcttcactcagatatcgacaccgtcgaacgtatggagattatccgcgacttgcgtctgggtgagttcgacgtgctggtagggatcaacttactgcgcgaaggtctggatatgccggaagtgtcgctggtggcgatcctcgacgctgacaaagaaggcttcctgcgttccgaacgttcgttgatccagaccattggtcgtgcggcacgtaacgttaacggtaaagcgattctctacggcgataagatcaccccatcaatggcgaaagcgattggcgaaaccgaacgtcgccgtgagaaacagcagaagtacaacgaggaacacggaattacgccgcaaggcttgaacaagaaagtggtcgatatcctggcgctggggcagaacattgccaaaaccaaagcgaagggcagaggaaaatcgcgcccgattgttgagccggataatgtgccgatggatatgtcgcctaaagcgttgcagcagaaaatccatgagctggaagggttgatgatgcaacacgcgcagaatctggagttcgaagaagcggcgcaaattcgtgaccagttgcatcagctgcgtgagctgtttatcgcggcatcgtaacaggatagcgaagaagactgatgacaaacggaaaacagcctgatgcgctacgcttatcaggcctacattttctccgcaatatattgaatttgcgcggtttgtaggccggataaggcgttcacgccgcatccggcataaacaacgcgcactttgtcttcaataggaagccggaattttccttcggatttccgttaacctaaagcctgtaacgccttttccagcgcgttatgtaacaactggcggtcatgacgatacggaatatcgctggcctccagtacctcctggatcacaatccgctctttcaccgccgagacatccacttttggcccgacgatgaccgcatcaatgacctttttaccaacatactgctccataattgccagcttgctttccagcttcaaattagccgcaggtaaactcaactcacgccccagattgccgatataaaccatcggcgctggcgtgcggcgtaatgcctgggcgatttccttcagcagcagaattggcatcaggctggtataaaaactgccaggcccaataatgatgagatccgcttcattgatagcgtgaaccgcctcacgcgttgcgggtacattaggcgttaacaataactcttgaatcggcgtagttaactggtcgatattgacctcgccgtaaacttcatgcccctgatcgtcaatcgccatcagatcaacaggatgctctgacattggaatcaaatgcgtatccactttcagcagattacgaattaaattgatggcttccagaggccgcacgctaaggtgatccagcgcctttaacatcaagtttccgagattatgaccggaaagttcgccattgccaccaaaacggtattcaaacatcgcggaggcgacgctcggttccgttatcagctggttgaggcagttgcgcatatcgccccaggcaatgccgccttctgaacggcgaatacgccccgtcgagccaccattatcggtggtggtgacgatacccgttaaacgagaacccaaagacgaaagtgatgagagaacgcgtcccagtccatgccctccgccgagagcaacgacacgatcaagatcagccagcgtacgattgcgcatatagtttcctggagtcagattatccgcgctacagtagcgcaaattgcggggaaacagcaattaacctgccaatattgaggatacaaactattttcttctacctctaaaggacgatgcacgctatgcctccctgatgatgtatatcaaagtaaaaccgccattttcccttattctgtagcgaaatagcacgatcatgacgctatatacatgattacatagcgaaagtgtggatggtaaaaatctcatttacacgctagtatcggcataaccactaaacactctagcctctgcacctgggtcaactgatacggtgctttggccgtgacaatgctcgtaaagattgccaccagggcgaaggaagaaatgacttcgcctcccgtatctggaaaggtgtacatggcttcacaactgactgatgcatttgcgcgtaagttttactacttgcgcctgtcgattaccgatgtgtgtaactttcgttgcacctactgcctgccggatggctacaaaccgagcggcgtcaccaataaaggctttcttaccgtcgatgaaattcgccgggttacgcgcgccttcgccagactgggcaccgaaaaagtgcgcctgacaggaggagagccgtctttacgccgcgactttaccgatatcatcgccgctgtgcgggaaaacgacgctatccgccagattgcggtcacaaccaatggttaccgtctggaacgcgatgtggcgagctggcgcgatgcgggacttactggcattaacgtcagtgtcgacagtctggacgcccgccagtttcacgctattaccgggcaggataaattcaaccaggtcatggcagggattgatgctgcatttgaggccggttttgagaaggtcaaagtcaataccgtgctgatgcgtgatgttaatcatcaccagctcgacacctttctgaactggatccagcatcgccctatccagctgcgtttcatcgaactgatggaaacgggcgagggcagcgagctcttccgtaagcatcacatctctggtcaggttctgcgtgacgagctactgcgtcgcggctggatccaccaattacgtcaacgcagcgacggtcccgcgcaagtcttttgccatccagattacgccggagagattggccttatcatgccgtatgaaaaagacttctgcgccacttgcaaccgcctgcgcgtttcctccattggtaaactccatctctgcctgtttggtgaaggcggcgttaacctgcgcgatctgctggaagacgatacccagcaacaggcgctggaagcgcgtatttcagcggcgctgcgggagaagaaacagacccatttcctgcatcaaaacaacaccggtattacgcaaaacttatcgtacattggcggctaaaacgtcaaaaggagagatcagatgagtcaggtaagcactgaatttatcccgacccgtattgctattcttacggtttctaatcgtcgcggtgaagaagacgatacctccggtcactatctgcgcgattcggcgcaagaagcgggccatcacgttgtcgataaagccattgtgaaagaaaaccgctacgctattcgcgctcaggtatctgcgtggatcgccagcgacgatgtacaagtggtattgattacgggtggtactggcctgacggaaggtgatcaggctcccgaagcattgctgccgttgttcgaccgtgaagttgaaggttttggtgaagtgttccggatgttgtcgtttgaagagattggcacttccacgttgcaatctcgtgcggtagcgggcgtcgccaacaaaacgctgattttcgccatgccgggttcgaccaaagcgtgccgtaccgcatgggaaaatatcatcgcgccgcagctggatgcccgtacgcgtccgtgtaatttccatccacatttgaagaaataagtatgtcgcaactgacccatatcaacgccgctggcgaagcgcacatggtggatgtctccgccaaagcggaaaccgtgcgtgaagcgcgggcggaagcctttgtcaccatgcgcagcgagacgctggcgatgattattgatggtcgccaccacaaaggcgacgtatttgccactgcgcgtattgccggtattcaggcggcaaaacgcacctgggatctgatcccgctctgtcatccgctgatgctcagcaaagttgaagtcaatttacaggccgagccggagcacaatcgggtgcgtatagaaaccttatgccgcctgaccgggaaaaccggtgtcgaaatggaagcattaaccgcggcctccgtggcggcgctgaccatttatgacatgtgcaaagcggtgcaaaaagatatggtgattggtccggtacgtttgctggcgaagagcggcggcaagtcgggtgactttaaggtggaagcggatgattaaagttctttttttcgcccaggtgcgcgagttggtgggaacagatgcaaccgaagtggctgcggatttcccaactgttgaagcgttacgccagcacatggctgcgcagagcgatcgctgggcgctggcgctggaagatggcaaattactggctgccgtcaaccagacgctggtgagttttgaccatccgctgactgacggcgacgaagtagctttcttcccgccggtaaccggaggttaagatggcagaaaccaaaattgttgttggtccgcagccgttcagcgtaggagaagagtacccgtggctggcggagcgtgacgaagacggtgcggtagtcacctttactggtaaggtgcgcaaccataacctgggcgacagcgtcaacgcattaaccctcgaacactatccggggatgactgaaaaagcactggcagaaattgttgatgaagcgcgtaaccgctggccgctggggcgcgtcactgtgattcaccgcatcggggaattatggccgggcgatgaaatcgtttttgtcggtgtcaccagtgcgcatcgcagcagtgcgtttgaagccgggcagtttattatggattatctcaaaacccgcgcaccgttctggaagcgcgaagccacgccggaaggcgaccgctgggttgaagctcgggagagcgatcagcaggcggcaaaacgctggtagttttttgttagccggataaggcaccgctgcgtccggcaatttcaccgctcagtacatacgtttacgctgcgtcgatgcacagcctcatcattttgcagtatccttaagatattccttatatcttcaggagatcgtcatggacagattcccacgttctgattcaatcgtacaaccccgggctggcttgcaaacttatatggctcaagtctatggctggatgaccgttggcttgttgctgaccgcatttgttgcctggtatgcggctaattccgcggccgtgatggagctgttgttcactaaccgtgtctttttaatcggtctgatcatcgcgcaattagcattggttattgtgttatcagcgatgattcaaaagctgagcgcaggtgtaacgacgatgctctttatgctttattcggcgctgacgggtcttacgctttccagtatattcattgtctataccgctgcttctatcgccagtactttcgtcgttactgccgggatgttcggcgcaatgagcctgtacggttacaccacgaagcgcgatttaagtggctttggcaatatgctgtttatggcgttaatcggcattgtgctggcatcgctggtcaacttctggttgaaaagcgaagcattgatgtgggcagttacctacatcggcgtgattgtctttgtcggattgacggcgtatgacacgcagaaactgaaaaatatgggtgagcagattgatacccgcgacacgtcgaacctgcgcaaatattccattcttggcgcgttaaccttgtatctggacttcatcaacctgttcctgatgttgttgcggatcttcggcaaccgccgttaattctttttcaccatcactatcccggccatgtgtcgggatttttttcttactaaaaacgacacttaacaagtaccaggtataaaatatgccttatggacgagcggaagcgttttctgtatccataaatgcaaaagtattttgtatgcgtggttttaaatttattgatggtgaatattaatattttttctaaggataactaaaagaatggaatcatactcgcaaaacagcaataaattagattttcagcacgaggccaggatattaaacggtatatggctcattaccgctttaggtttggtggcaaccgcaggactagcctggggagctaagtatatcgaaattacggcaaccaaatatgattcaccaccaatgtatgtcgccatagggttattattactttgtatgtatggcttaagtaaggatatcaacaagataaatgccgccatcgcgggcgtaatatatctgtttttactctctttggtggcgattgtcgttgcaagtttagttcctgtatatgccattatcatcgtgttcagcactgcgggcgcgatgtttttaatcagtatgctggccggtttattatttaatgttgatcctggttctcaccgttttatcattatgatgacgttgacagggttggccctggtaatcatcgtgaatgcggcattaatgagtgaacggcccatttggataataagttgcttaatgattgtgttatggtcaggcattatctcgcatggacgaaataagctccttgaattggcggggaaatgccatagtgaagagttgtggagtccggttcgttgcgcttttacaggtgcattaacactctattactattttatcggcttctttgggatacttgccgcgatagctataacgcttgtctggcaaaggcatacgcgtttttttcattagccgtaaatgcacatactaaagaacttaactaaacttcacatcgccgcttcatttttcgcccgtagcttcttcgcctggctttccagcaacaggtaacagatcagcgccagcagcagtgggataaagtaatacagcacacggtaagcgagtagggcggcgataattgtacctttggaggtatgctccccagccagtagtgcgataaacaccgcttccagcacaccgatccccgccggaatatgcacgatgacgccagcaatactactaaccagtaacacgcccagtacaaagaaatagttcacgctttgaccaagtaacagccagataatcgcccccattaccatccagttaacgctggaaatcagcatctgagcgagggcgaatttccatgaaggcagcaccagcttttgccctttgatggtcatatggcggtgcttcgcgaaagcgcaaaaccacaaataaaccgcgataatcatcagtaagccaatgccgagaatacgcagcgtagtttgatcgacataccagtgatccggcaactccaccacgcctgcggtaaagataatccctgccagtaaaatgtagcccagccagttggtggtaatactgagcgagaaaatccgcgtaatagtgctaccgggcaaccccagacgagagtacaaacgatagcgcataccaatgccgccgacccaggtactgagcgtcaggttgaaggcgtagcagataaacgacaccagcatcacctggcgcttcgccagtttgtgaccgcagtaaaagcgggcgagcaggtcatagcagccgtaaatcagatagctgacgaccaccagcccgaccgcactaagcagcgcaacgcgattgtagtcgcggatgaccttccagacctcttcccagtccacttttttggcgtagaccaccagcaacacaatcaccgcgataaaaaacagccaggtgaggatcttctttgctaagcgccagcgcgggtgtgatttactcatcagggttttacccccgtgttttcagtttctacccgatcctgcgtttccattgtcggttgtgcgggcggatcaacctgcgccagacgtggcgtgtgtgccggaagccagccaaccagcgccgggaagtggcgtaaaaagtggaacgccagcacgcttttggtcaggttccaccaggtgcgtttgggcagcatggtttcatccacctgctgacaatctgcggcaataatgccgttcagattatcgcgcagcgtctggttaaaatgacgatcgtggatgatgacatttgcttcgagattcagtgacaaactgagcggatcgagattactggaccctactgtcgcccagtgatcgtccatcaatgccactttgccgtggagcgggcggcggcggtactcaaaaacctgaacgccgcctttaaccagatagttatacagcaagcgcgcaccgactctgacaatcggcatatccggttcgccctgaatgatcagtttgatccgcaccccgcgccgtgccgctttacgcaaggcgtgtaaaaatcgatagccggggaagaagtaggcgttggcgataatcacttcccgccgcgcctgagtgagcattttcaaataatggcgttcaatatcatcgcgatgttcttcgttatcgcgccagaccagcaatacctgcgcttctcccggctggcggttctcttccgctttgtgatgacgtcgccaccagcgtcgtgccgcgctctgtccaggcaggttttccagctcaaactggagaatatcttcgacaatcggcccttcaaggcgtaccgcgtaatcctgtttagcctctggaccgtagctggacatatgctcggcggagtaattcagcccgccaataaaggctatacgcgcgtcgatcaccacaattttgcgatgcatccggcgaaacacattggtgcgcataccaaaaaggcgagggcggggatcgtagtagcggaacactacgccagctgccgtcagttcattgacaaactcatcgctgagatccggcgaaccgtagccatccagcaagacttccgctttaaccccgcgttgcgctgctgccagtagtgccgcatgcagttgtttgccgacgtcatcctcaaaccagataaacgtttcaagaatgatgcgttcttgtgcctcgccaatcgccttaaacaccgcgggataatattgctcgccgttttccagcaactggatcttattgccttcgcgccagctacatttcataaatgaatctccgcacttaaaggggcatgatcagaaaggtgtcgccatgtccgcagcggcaacgcggttggcgcgctggcgctggcatttttgacgtagatcctgtccagtcgtagtagaggaaattgcaccggaaacgtgcgcgccgggcgtccgtgggcgcgggtaaaaatctcatccagtccggcctgcacttttaacggatgattagctttttgccgccagtcattgaaatcacccgccaccaataccggttcgccgtccggtagctcattcacccattcggcgagcatcgcaagctgcgcctgacggtgcgcctcacgcaggcccagatgtacgcacatcacatgaatcgcttttccggtcatcggcggcacaatgcggcagtagagcacgccgcgcttttccgcaccatcgaccgaaacatcgcgattctcataatgttcaatgggataacgcgacagtacggcgttgccgtgatgcccttccgggtatacggcattgcgaccgtaggcaaaatcgctccacatagtgtcggcgagaaactcgtagtgcgaggtatcgggccagttttccacatgcagcggatgaacttcgtgcgcgcccatcacttcctgcaggcaaacaatatcggcgctgacggtacgcacggcgtcgcgaagttccggcaaaatgaagcgtcggttaaacgcggtaaagcctttgtgaatattgatggtgagcaccttgaacgaaaattgttgtgtttgatcgggcataattttcctgtctttgcctcttatctcattgaaatagtgtagtcggcgtcacaaaaaggtgcggtcttacggaattttccgtaaagttcggtactctgagtaagtagagataaattcttcaggagagaagccatgaagtggcaacaacgtgttcgtgtcgcaacgggtctaagttgctggcagattatgttgcatttactggtagtggcgctgctggtggtgggctggatgagtaagactctggttcacgtcggcgtgggattatgcgcactgtattgtgtcacggtagtgatgatgctggtgtttcagcgccaccccgagcaacgctggcgtgaggtggcagacgtgctggaagagctgaccacgacctggtattttggcgcagcgctgattgtgctgtggctgttgtcccgcgttctggaaaacaactttttgctggcaattgcagggctggcaatccttgccggcccggcggtagtgtctttgctggcgaaagataagaagttacatcaccttacgtctaaacatcgcgtacgccgctgaccctgtcgtggccgttatcaccagtagcggccacaaactattccacacaatatccagactcgcatccttcaaataaatctgcttggtaatgtccgtaaagtggcgaatagggttaatccacgtcaggttttgcagccataccggcatgttttccaccggagaaacgtaaccggaaaggagaatggcgggcatcataaagacaaacacgccgataaacgcctgctgttgtgttgaacagagtgatgaaatcaacagaccgaatcccaccagcgataaaccataaatcaccatcgtaaagtagaacagcgccagcgatccggcgaaggggatttgatacgcccagataccaatcgccagcacaatggtggcctggaaggtggcgacaattaacgccggtacggctttgccgatgaagatctgccaggtggtgagcggcgaaaccagtagctgatcgagcgtaccttgttcacgttcgcgggcgacggaaagtgaagtgacgatcattacgccgatagtggtgatcatggcgatcagtgacggcaccacaaaccatttgtagtcgagattcgggttataccagttgcgtaccaccagctcgctgttgttaggtttcggttttccttccagcagctcctgctgataatttttgacgatctgttgcaggtagttggcggcaatttgcgcactgttggagttacgcccgtcgaggatcaactgcaaaggcgcggtctggaaggtatccagtttgcgcgagaagtcagccgggaaacgcaccagtagtaacgccttttgtgtgtcgatggttgggcggatctcctgtgggcttttcagcagcagcacatgagtaaaggcgctggcgcgggcaaaacgttgggtcagctccaccgaatgctcgccgttatcttcatcgtagatggcgatggtggcgttagtcacttccagcgtggcggcgaacgggaacaggatcacctgaattagcacgggtaaaatcagaatcgcgcgggtttgcggttcgcgcagcaacgactgcaactctttgcggattaacgtccataagcgatgaaacatgctcttctccctaatccagccgacgtttggttttcagccacgtcaggccgataaacatcaccgccgaagcgatcaaaaacagcacgtttaccaccagcaccactggaatattcccggcgaggaacaggctttgcagggtgctgacgaaataacgagcgggaataatgtacgtcaccgcgcggatcaccgcgggcatactgtcgatctgaaaaataaagccggaaagcataatcgacggcagaaaagcggcgttcagggcgacctgagcggcattgaactggttgcgggtaatcgtggaaatcagcagccccatccccagggtactgagtaaaaacaggctggagataaaaaacagaatcagcagcgacccgcgatacggcacgccgagaataaacactgacaccagcatacacagcaacatcgccagcatcccgagaaagtaataagggatcagcttacacagcagcagttccgtgcgggtaatctccgtagagagcagagcctccatggtgccgcgttcccattctcgcgccaccaccagcgaggtgagaatcgcgccgatgaccgtcatgataatggtcaccgcaccggggataatgaagtgctggctaatcgccgccgggttaaaccagtagcgggtttgtacatcaataagcggttcaaaagtctgcccgttgtcctccgctcgctgcatttgccagatctgccagatcccttcgacatacccctgtacaaagttagcggtattcggctcactgccgtcggtgatcacctgaatcggtgcggtggcgttggcgcgctccatctgttccgcaaaatccaccggaataaccaccagaccgcgaattttccccgcctgcattttggcgatcagttcctgacggttatcgctgatggtggcgtcgatgtagggcgaaccggtcatggtgtgggtgaaatccagcgccgcttcgctacgctgttccagtaaaatcccgacccgcagcttgctggagtcgaggttaatgccgtaaccaaaaataaacagcagtagcagcgggatcactaccgcaatcagccagctactcggatcgcgaacgatctgccgcgtctctttaacgcacagcgcccgtacgcgacgccaggacaggatcgggttactcattgctatgctccttatcccagtcgtggatcaactgaataaaggcttgctccatggtgggatcgggttgctcatcgttagccgactgtgctttcaaatcgtccggcgtgccgctggcgattaatttcccgcggtacaccaggccgatgcggtcgcaatattccgcttcatccataaagtgggtggtgaccatcaccgtgacgcctttctctaccatgctgttgatgtgcagccaaaattcacggcgggtgagggggtcaacgccggaagtcggttcgtcgagaaacagaatgtccggttcatgcatcagcgaacaggccagcgccagccgctgtttaaaacctaatggcagttcatcggtggcgtgggaggcgatacttttcaggccgaacgcctcgctcatgcgggagattttttcgttctgcgcccgaccgcgtaagccatacacaccagagaaaaagcgtaaattctgttcgaccgtcaggttaccgtagagcgaaaatttttgcgccatatagccgagatgctggcgcgctttaccggaactctctttcagatccatccccagcaccagcgcctggccggaagtcggcaccagcaaaccgcacatcatcttaaaggtggtcgatttacccgcgccgtttggccccagcaaaccaaaaatctccccacgtttaacggcaaagttgacgtgatcggtggcggcaaaatccccaaatttcttggtcagttctttcgcttcgatcaccgtctcgccgggtgtgccttctaccgtatgtaatattgcgcccagcggcgattccgaggttccggcaccgcccagcaaatcaataaacgcatcttcaaaacgcggcgtagtttcgttgatgttgatttccggcatcccgtcggcatggcgaatatcgtctggtgtggcctcttttttgaggatcagacgtaccgatttcccctgaatcatgccgtcgctgacctgcggcagtttcaaggcgcgttgcaacagtttgcggttgccctcgtgtggactggtcatcagaaagctgcgtccggccatggtttgtgtcagggcttttggttctccctgatacagcaactcgccttcgttcatcagtaacacgtcacggcactgctcggcttcgtcgagatacgaggtactccagaggattaacatcccttcgcccgccagctcatgcaccatctgccacagttcgcgccgtgagatagggtcaacgccgacgccgggttcatcgagcagcaacactttcggttcgcccaccagggtacaggccagaccgagtttttgtttcatcccaccggagagcttgcccgccaggcgtccggtaaacggcccaagagacgtaaactccagcaggcgagcaaaagtttgcttacgtgcctcgccggtgacgctgcgcaaatccgcgtacagattgaggttctccatcaccgtgagatcttcatacagaccaaatttctgcggcatataaccgagcacggcgtgcagcgcgccgtcgtttttgatcggatcaaagccaatcaccgtggcactgccgctgtcgggtttcagtaatcccgccaacatccgcatcagcgtggttttacctgcaccgtccggccccaccaaccccgtcacataaccggcgtgaatggtacaatcgagcggcgcgacggcgggcttgtccatgcccggaaagcgtttttccaggccgttcagcgtgataacggcatcattcatgtcctgcctcgtcaccgaattgtaccgtcactggcattccctggcgtaacgcatcatcggcgtcggtcaccacaatacgcaggcgatagacgaggtcggtacgcagatccggcgtttcgacggttttcggggtaaattcagcagtcggcgaaacgaaaccaatctgcccgtgatacggcttgtccgggcgaccatcggtataaagcagcactttgcgccccggctgggcctggtcaagattacgttcatcaacataagcgcgcacccacaccggacgcgttagtgaaacggtaaacaccgtgccaccttcattgaggaccgtgcctggctccaccgcgcgcgttaacagcgtgccatcagacggggctatcaacgttgagtcctgtaaattcaactccgcctgcgccagttgcgcctgcgcctgttcgaggctggctttcgcctgagcgatgtcctgttcacggttaccggaacggtactgacgcaatttatcctgtgctgatttcagcgttgcctgcgcctggtcgcgcgaggagcgggcattttccaggtcatttgccgaaatagtgcggcttttccacaacccttgctggcggttatagaagttctgcgcatagtcataggcggcttgcgcctgtttcaccgctgcggcggcctgagcgatttcttcattgcgatacccggcaagcatcaggtcatactgcgcctgtgccaccgaaacacccgctttcgcctgcatcagggcaatctcatacggcttgtgatccagttcgcccagcacctggcccgctttgatagcatcaccttcgtccaccgccagcgattcaacgcgccccccaacacggaaactaagatttaccgtacgaatatccacgttgccatacagcgtcaggccgttatcctggcggctttgataccaccagtagcctccggcaaccacggcggcaagtaccactaccgccaatccgatcacgacaggttttttcatcactacaaactcctttgcgataatccttgcaaaatcaggtcgatatgacaggtcaccgtctggttgatcagttcggtcttttcttcatcgaacgcggtccagccggtacgtaacagaattgtttctttgccaagacggaacgccagaatctcaccaatcaacgcatgggtatgaaggatcatgcgggtgtcattggcgtcgcagccggtccaggcggcaatcaggcgtgtcaggtggctgtgtagcggactaatcacctgttcgtgcaccaggtggtaggctgccgtgggagagagctgctcacgggagataaacttgctgaggttgacggtgtcatcctgggtgagcagcttaatcatgttcctgcaggcgcgaaggatcagttcacggatggcagcccgatcaggctgtggttgcgcgaacaagcgttcggcttcctcggcatgcggacggaactgctcgccaataaaatcggcaatccactgggcgcaggcgaggtacaaatcttctttcgaaccgaagtagtaggtgatggcagcgatattctgcccggcctgggcggctatctcgcgagtggtggcgttcattccatattcaccaaactgcgccagtgcggcagcaatcagctgttttttcgcctgttcacccttgattgtcatggcaggattattcatcgcacagtccattcttaatcaaatgattgattaagattatgactccataggggagttgtccagtatggctaagaattttagcaacgccagtcacagggataatttatgcgctgcgtcacaaaaactgctacactccgctccctcatgacattgtggtttttgtcattttccttttcagtatctccctgaaaactacaccggtaacggtcggggcggttcggagtagttatgtctttcgattctttgggtttaagccctgatatcctgcgcgccgttgccgagcagggttaccgtgaacccacccctattcagcagcaggcgatccctgcggtgctggaaggccgcgacctgatggctagcgcccagaccggcaccggcaaaacagcgggctttacgctgccgctgttgcaacacctgatcactcgccagccgcacgccaaagggcgtcgtccggtacgtgcgctcattcttaccccgacccgtgaactggcggcgcagattggcgaaaacgtccgtgattacagcaaatacctgaacattcgttcgctggtggtgtttggtggtgtgagtattaacccgcagatgatgaaactgcgtggcggcgttgatgtgctggtggcaaccccgggacgtttgctggacctggaacatcagaatgcagtgaagctggatcaggttgaaatcctcgtcctcgatgaagctgaccgcatgctcgacatgggctttatccacgatatccgtcgcgtgttaacaaaactacctgcgaagcgccagaacctgttattctccgcgaccttctctgacgatattaaagccctggcggaaaaactgttgcacaacccgctggaaatcgaagtggcacgccgcaataccgcgtctgatcaggtgacccagcacgttcactttgtcgataagaaacgcaaacgcgaattgctgtcgcacatgattgggaaagggaactggcagcaggtgctggtgtttacccgtaccaaacacggcgctaaccatctggctgaacagctcaataaagatggcatccgtagtgcggcgatccacggcaataaatcgcaaggtgcgcgtactcgtgcgctggctgattttaaatcgggcgatattcgtgtactggtggcaactgacatcgctgcgcgcggcctggatattgaagagctgccgcacgtcgtcaactatgaactgccaaacgtacctgaagattatgtccaccgtatcgggcgtaccggtcgtgcggctgctaccggtgaagcgttgtcgctggtgtgtgttgatgaacacaaactgctgcgtgatatcgaaaaactgctgaaaaaagagatcccgcgcattgcgattccgggctatgagccggacccgtcaatcaaagccgaaccgatccagaacggtcgccagcaacgtggcggcggcggtcgtgggcaaggtggtggtcgcggtcaacagcaaccacgccgtggggaaggtggcgcaaaatctgcaagcgcgaaacctgcagaaaaaccgtctcgccgcctcggcgatgccaaaccggcaggcgaacaacaacgtcgccgccgtccgcgtaaacctgccgctgcgcagtaatcttttatgccgggctatgcccggcatcaggctgatgaacaaacgcaaaactgcctgatgcgctacgcttatcaggcctacgtgaactctgcaatatattgaatttgcatgcttttgtaggccggataaggcgtttacgccgcatccggcatttcacaacaagcacttgtcagcaatttgagaacacgggaaaaaatttatctgttttaccgcccataagccaccgagacgttacttctctatagccaattgttcgcgcaactccattaaaaggtagcccagtcgattcttgcccttaccatgaccaccgtctccccagtaagcatcgttttccgtatgctcaaccagttttgcgggcgcggttgccagcaagagcgcacgcagttctgcatgctgttcgaatttagcgcgaagtgcttttcgcatcacctgttctttgaccgactcccagtttttacgcagaggcttagaacgatcgcgccccatgcgtgcggcgaccataggggaagaaacccgacggatctcttcgcggtatttttcatcaaggaatttttgtgcctgaaaatagtgttctgaggtaggccaggttttcccgtcaaccttgatgggccaggcggcaaagttagaaaaatcaccgtagtcatcgctggtgctgtagaaatttatgatggtgtcttgcatgacgtgttggatcctttgtgctcgaacgggcattaaaccgcattatgttggtggttattgcgagccgctttccagaaacagaaaaaccattacccctgaaaaccgaaaaatgccacaatattggctgtttatacagtatttcaggttttctcatggcattaaccgccgcgcttaaagcgcaaattgccgcctggtataaggcgcttcaggaacagatccccgactttattccccgtgcgccgcagcggcagatgattgcggacgtcgccaaaacgctggccggagaagaagggcgacatctggcgattgaagcccccaccggcgttgggaaaacgctctcttatttgattcccggcatcgccattgcccgcgaagagcaaaaaacgctggtggtgagtaccgccaacgtggcattgcaggatcagatttacagcaaagatttaccgctgctgaaaaagatcattcccgatcttaaattcactgccgcttttgggcgtgggcgctacgtttgtccgcgtaatctgacggcgctcgccagtactgaacccacgcaacaggatctgctggcgtttcttgacgacgaactgacgccgaacaatcaggaagagcaaaaacgttgtgcgaagctgaagggcgatctcgatacttataaatgggatggtctgcgcgatcatactgatatcgctatagatgacgatctctggcgtcgtttaagtaccgacaaagccagctgcctcaaccgcaattgttactactatcgtgaatgcccgttttttgtcgctcgtcgggagattcaggaagcggaagtggtggtggcaaaccatgcgctggtgatggcggcgatggaaagcgaagcggtattgcctgacccgaaaaatttactgctggtgctggacgaaggccatcacctgccggatgtggcgcgggatgcgcttgagatgagcgccgaaatcaccgcgccgtggtatcggctacagctggacttgttcacgaaactggtcgctacctgcatggagcagtttcgcccgaagaccatcccaccgctggcgatccctgaacgtttgaatgcgcattgtgaagagttgtatgagcttatcgcctcgttaaacaacattctcaatctctacatgcctgccgggcaggaggcagagcaccgttttgcgatgggcgaactgccagatgaagtgctggagatctgccagcggctggcaaaactcaccgagatgctgcgtggcctggcggagttatttcttaacgatttaagtgagaaaaccggcagccatgacattgtacgtctgcatcggttgattttgcagatgaaccgcgcgttggggatgttcgaggcgcaaagcaaactctggcggctggcttcgctggcgcaatcttccggtgcaccggtgaccaaatgggcgacgcgggaagagcgcgaagggcagctacacctctggtttcactgcgtgggaatacgtgtcagcgatcagctggaaaggctgctgtggcgcagtattccgcacattattgtcacctccgcaaccttgcgttcgctgaacagtttttcgcgtttgcaggagatgagtggtctgaaagagaaagcgggcgaccgttttgtggcgctggattccccctttaaccactgcgaacagggcaaaattgttattccccggatgcgcgttgagccttccatcgacaacgaagagcagcatattgccgaaatggcggcctttttccgtaagcaggtggagagcaaaaaacatctcggtatgttggtactgtttgccagcggacgggcgatgcagcgctttctcgactatgtgacggatttacgtctgatgttgctggttcagggcgatcagccgcgttaccgtttagttgaactgcaccgcaaacgcgtcgccaacggtgagcgcagcgtgctggtgggcttacagtcatttgccgaagggcttgatttgaaaggtgatctgctcagccaggtgcatatccacaaaatcgcttttccgcccatcgacagcccggtggtgatcaccgaaggggaatggctgaaaagcctcaaccgctatccgtttgaggtgcaaagcctgccgagcgcctcgtttaacctgattcagcaggttgggcgactgattcgaagccacggttgctggggcgaagtggttatctacgacaaacgcttgctgaccaaaaattatggcaagcgactactggatgcattaccggtatttccgatagagcaaccggaagtccctgaaggtatagttaaaaagaaagaaaaaacgaaatccccacgccgtcggcggcgttaatgatgtgagtcaggtaaggagtcgtaaatggactatcgcaaaatcattaaagagatcgggcgcgggaaaaaccacgcgcgcgatttagaccgggatactgcgcgcggtctgtatgctcatatgctcaatggtgaagtccctgaccttgagttgggcggcgtattgattgcgctgcgtatcaaaggagaaggggaagcagagatgctcggcttttacgaagccatgcaaaatcacaccatcaagctgacgccgccagcaggcaagccgatgccgattgtcatccccagttacaacggcgcgcgtaaacaggccaacctgacgccgttgttggcgattctcctgcacaaactcggttttcctgtggtggttcacggggttagcgaagatccaacccgcgtgctgactgaaaccatttttgaattgatgggtattacgccaacgttgcacggcgggcaggcgcaggcgaagctcgacgaacatcaaccggtgtttatgccagtcggcgcgttttgcccgccgctggaaaaacaactggcgatgcgctggcggatgggcgtgcgtaacagtgcacataccctggcgaaactggcgacgccatttgccgaaggtgaggcgctgcgtctttccagcgtttcgcatccggaatacattggacgcgtcgcgaagttctttagcgatatcggcgggcgggcgctactaatgcatggtactgaaggtgaagtgtatgctaatccgcagcgctgcccgcagatcaatctcattgaccgtgaagggatgcgggtgctgtatgaaaaacaggacactgctggtagcgagttactgccacaagcaaaagatccggaaaccacggcgcagtggattgagcgttgccttgctggcagcgaaccgattcccgaatcgctgaaaatccagatggcttgctgcctggtggctacgggtgaagcggcaactatcagcgacggcctggcgcgcgttaatcaggcattttaattcttttctcagccggatgagccatgtcatccggcttttaccccaccgcaatatgaaattcctgcatctttattgaccttcccacgcccggcgtgcagcataaaaatacaacaaacacataacataaacaggagttaaccatggaaagtggtcatcgctttgatgctcagacgctgcacagttttattcaggctgtatttcgtcagatgggtagcgaggaacaagaagcgaaattagttgccgatcatttaatcgcggcaaacctggcagggcatgattcacatggtattggcatgatcccaagctatgtacgctcctggagtcaggggcacctgcaaattaaccatcatgccaaaaccgttaaagaggcgggggcggcggtcacgctcgatggcgatcgcgcatttggtcaggtcgcggcacatgaagcgatggcgctggggattgagaaagcgcatcagcacggtattgccgccgtggcgctacataactcgcatcatatcggccgtatcggttactgggcggagcagtgtgcagcggcggggtttgtctctatccactttgttagcgtggtcggtattccaatggtcgcgccgttccacggtcgcgacagccgctttggcaccaatccgttctgtgtggttttccctcgtaaagataatttcccgctgttgcttgattacgccaccagcgccattgcatttggcaaaacccgcgtcgcctggcataaaggcgtccccgtgccgccaggttgcctgattgacgttaacggcgtgccgacgaccaatccggcggtaatgcaggagtcgccgttgggttcgctgttgacctttgccgaacataaaggctacgcccttgcagcgatgtgtgaaattcttggcggggcgctttccggcggtaaaacgacgcatcaggaaacgttacaaaccagtcccgatgccattcttaactgcatgaccactatcatcatcaacccggaactcttcggcgcgccggattgtaacgcgcagaccgaagcctttgccgagtgggtgaaagcctcgccgcatgatgatgataagccgattttgctaccgggcgagtgggaagtgaacacgcgtcgcgaacggcagaagcaggggattccactggatgcgggaagctggcaggccatttgtgatgcagcgcggcagattggtatgccggaagagacgttgcaggctttctgtcagcagttagccagctaaaaaaaagcccgtccagtggcggacgggcaaacaagggtaacataggatcaatgagggttagagcatatgcgtctgtcggcaaacagacagggaaatacttgtgctggacgtagcgtaaacgcctgatccgtccaacggttcggattttgtaggcctgataagacgcggtagcgtcgcatcaggcatctgttgccggatgcggcgtaaacgccttatccgtcctacgaattacttataaattaccgcagtaccgcttaatttattgttgttggtggcggaagtgatgctgtatccactggcaccggctgccgcggctttctcagccagtttcgcttccagggcatcgagggtggatgcgccatcggcagaaaccacgccgattttattcatgttctgtgcctgggatgccgttaccggttccgccgcgaacacgccaaatgacagagttgaaagagccatagcagcaacaacagtattgatagttttcataattaatctctcgcaggtgatttttgtataagtgacgttgtttcgtcgatgtgatgagtatcacgtttttttacgagagataaaatcgaagagaattgaccgccttgttcaaataaattgattgatatctaacctactgataaaccatttatttgttgtacttatgaacttgttttataccgcgtggcagtcacagcagcgttaaaggcacggaatgacacgcaaaatacaaattatactcgctatgcatctcgccagttgtagttaacgtaactggctgtctttcgaacctctgcgattatatcctgtataagctggtttttgtaaatctttctcctgctgacaatgaatacataagcgcacgccaggaatggcttcccgacgggcctgcgggatgggggcaccgcactcttcacattcatccaggctttcgccgcgcggaatttcaccccgagcgcgggcaatcgcatcttcaattgtactgttgatctgttcgttgacggcgtcatcgttagcccaaccggatgccatatcgacctccccatatcaatacttgtacagttaagtgtagctaatccagggacgaactcgggcagttcaagcatcagatctccgaccattcccgcagcagattatgataaagattaagcagcgacaggatctcttcactttcgccgtagcggcttttcagcgactgaatattgttgtccagttcaaacagcatggcgcgctttttatcatcgcggatcatcgactggatccacataaatgatgccactcgtacgccgcgggttacgggtgtcacgcaatgcaggctgctggagggatacaacacgagatcgcctgccgggagttttacccgatgttgtccgaaggtgtcattaacgaccagttcgccgccgtcgtagctttgtggatcgcttaaaaacagcgtggcagaaaggtcagtacgcatccagccgttttgtggatggctgcgtactgcgccatccacatggaaaccataggtttcattgttctgatagcgattaaacagcggcgtggaaagggtacgcggcaaggccgcggcaaagaataaagcatgttggttaaccgcgttcagcacctcattttgcagggcggcgtataacgtgctgcgggtgtcgacctgttgattgttcttaacttgcgcaccttgtgcgccggtggtgacgcgtccatccacccattcggcttgttccagttgttcgcgaaaacgagcgacgtcctgtggcgataacacgccgggaatgtggtacatcatacaatttctccaaaaagtggggcctgcgccccacatctgaatcagaaatgcatattggctgtgagcaagaaggttcttggctcgcccgggtgataacggtagccgctcttgttgattgaggcgacgtaatcggtatcaaacaggttgtaaacgtttagctggaagtcgagattgcgattaactcgataccccagtttggcatcggcgacccagtaaccttcggtaaacgctggcgttcccaccgcgccgtctgaacctttatgcatactgccgatatagcgtgcgcccgcgccaacagagatatcgtcggttgcctgatattggctccataaggtgaaggcgtgctccggggtatacggcagcgatgaggaaccatcctgggcaacatctttgccgtttttgatggttgctttttgctgggtatagccgccaatcacctgccacgcgggagtgatattcccggccacggatatctcatagccttcgacgcgtttcttaccgtattgcgagtaagttccgtcatcattttgctcaacttcattttcgatatcagtgcggaacagcgcggcggtgagcaacagacgtttatccagaacctgccatttggtgccaatctcgctggtgttggctttttgcggtttaaaatcggtgcggttggcactgttaccgctgccagactgcgcaagggcgaagttgttgccgcccggaggctgctgggaaacggcatagttaatatagacattgccgttttccgtcaggtgatacagcgccccggctttccagttcatcagattgcccgacttggcggtgtcgacggtggtgaccggagaaccttttgccacaccagttgggcaggtgatggcaccgcgtccgctgccgccgcaggcggtggcactgtcatattcagtatgataattatccagacggatcccgccgttcagctcaaaatcacgggtgatttgcagcgtatcaaaggcgtaaattgcgaaggtatccgtctgaccattggcgtttgcgccgttgcgcgtcaggccgccgggatgaatgctgctgtcaggatgataaatatttaccgcgggtaacgtcaccggattaacgccgtagttagtctgcgtttcacgggtaaattccacgccggtactgacatcatgaccgatagaaccggtatagaacgtcgaggtcaggttggtctggttggtgagaattttattactcacatctttggtattcgccgtgcgtgaccaggtccagctattcacatcgctggtgggctgagtaatattcgacgccccgcccataatcgccgtcatcaggtaatcctgctttacgcgcgaccaacgggtagtattgcgaatggtggtgttatcgttgatgtcgtgctcaaaacgcatggtggcggtgtcggtggtcgaatcgtcgtaatcggaatccgtgccgtaaaagttatgagtatcaacttttccggaatgattcagggccgccgttcccgcagatggggcagaatagcccggcaaaccgatggtcggaatgccgccgtctggcgtgttgtgctgggtgacatgcagataattaagatacaaacgattcgctgtaccaaggccaaaagcgacagaaggggcgacgccgtaacgctcatttttgactttgtcgcgtccggcatcgtgcgttttttcgcccattacattcaggcgcaccgcggtggtatcaccaatgacctgattgacgtccagcgtgccgcggcggaaccaggcgctgccaatactggcggaggcgtcaatgccggaatcattgcgcggctgcttgctgatcatattgatcgagcctgtcggtgcgctgcgcccgtagtcggtgccggacggccctttaatcacttcgacctgctcggtattgaaggtgtcgcgcgagacgctgccgatatcgcgaatgccatcaatataaatactgttagaggtatcggcaccacgcatataaatggcgtcgccagtggtggagttaccgttctcacccgcaaaaaacgcacccacgccggggacgtttttgagcgcgtcggtaaggttggttgcgccctgatctttaatcacttgttcagaaattaccgtcatcgtgcgggtagtatccgctaccggacgcgagaatttcggatcggcagattgttgtggcgcataaagcgaaggcgttgatgcttcgacaaccagcgtgtcatccgcgttagtttgcccttcggcggcgagtgcctgagccacaggcgtgatgccaatacaaagaccggcaaagaacgtgagcgaatgaaattgtctggcagggaaattgcgattgttttccattttgcaggtgactttttcttatatgttgaaattttcactgccacgagaaagcctctctgcggatgcgatgccactgttaatcccgtgatagtgctcgtgaaagtgataataattttgataagcattatcacttggagcgattttctatcacccattgcgcgaaaaagaaatacatttatttacattgagttcatatttgatgttttttgattacaaaacagacgaaaactgcatccagaggcgaatgcagttacgttggtggggttatttgtagatggttgcagtaccgaacatctggtcatttccgcctgcggaattaatgacataacctttcgcgccttgttcgcgcgctttttctgccagtttatcctccagatcgcttaggtttgatgcgccagttgccgaaacggtaccggcgggccgtagctgaccgctgtccaggttactcatcggttgcgcggcataagccgtgagagagattccgctcaggacggtggcaatcagtagtgtgaggcactttttcataatgacatcctcataaatacaacgggtagtgcctgataagtgtaggtcgcctgcgcgatgcaaatgacgcaaaaaattgacagagatgtgcttattttttgaacgatatatttttacaaaataagacaaatcaatgacatgcataatgctgatttttatgatgaattgccataaaccatagccatgttaaggttttggggaatgataaacgcagccagatatttaccctgtcgcgttatgcgggtatcttacgccgctgcttaaaggagaatgctatgtccgcccagaaaccggggttgcatccgcgcaaccgtcatcacagccgctacgatctcgccacgctttgtcaggtcaatcctgaactcaggcaattcctcacgcttacacccgccggggagcaaagcgtagactttgccaatccgctggcggtgaaggcgctcaataaggcgttgctggcccatttttacgccgtagcgaactgggatatccccgacggttttctctgcccaccagtaccgggccgggcggattatattcatcaccttgccgatttactggcagaagcaagcggaacaattccagcgaatgccagcattctggatatcggcgttggtgcgaactgtatttatccgctgattggcgtacatgaatatggctggcgttttaccggtagtgaaaccagcagccaggcgttaagcagtgcgcaggcgattatcagttctaatccggggcttaaccgcgccattcgtctgcgtcggcaaaaagagagtggggcgatttttaacggcatcatccataaaaacgagcaatacgacgcgaccttgtgtaacccgccattccacgattccgccgctgcggcacgggcaggtagtgagcgtaaacgccgtaacctggggctgaacaaagacgatgcactgaactttggcggccagcaacaggagttgtggtgtgaaggcggtgaagtcacctttatcaaaaagatgattgaagagagcaaaggcttcgcgaagcaggtgatgtggtttacatcactggtatctcgtggtgaaaacttaccgccgttgtatcgtgccctgacggacgtgggcgcggtgaaggtggttaaaaaagagatggcccaggggcaaaagcagagtcgctttattgcctggacctttatgaacgacgagcagcgccgccgttttgtcaatcgccagcgttaaagcgttggttcccccggcggtaacggttcagccggggtcgcgcccggagcaggcagcacctgataagtctgcactggcgcgcgaacgcccgccaggtcgaaatgttttttcacctggctgtcgagggcaaagcgtaccgtccactgtttgagtggcagcgtggtgaacgaaacacgcagtgtaaacgcggtattgcttaagccgacaatcccggcaaaattcggttcaccaataatcagcccgcgaatttcttcgttttccattaattccgctaccgcatctttcagtgcctgattggctttatcagcatcttcatggcgatcaacatcataatttgccaccaccgaaccaatgccgcggacaaagttagcaaaggtggttatcgaagaccacggaatgatgtgatacgccccggtatcctgtcgtacgcccacggagcgaatcgacatccgttccactgtgccggtcaacggcccgatagtcaccaaatctccagtgttcatgccgttttcaaactgaataaataccccggtgataatatctttcaccagcgtttgcgaaccaaacgagatagccagacctaatgccccggcacctgccagcaatggcgcgatattgacgccgatttccgacaacacaatcatgatggtgatggtactgataatcaccgccagcgcgttacgaaacagcgtaagcagggtacgcgtgcgggcgctgggtagcgggcggccatgaatatccgaagccagccggttttcgatcaaactggcgagcaccgtccagccaaccgccgagaagaaaagaatgagtgcgatacggatcaggatatctacggttttctgccccgcgccgttttgcagccagttccagaaatcgaacaatccccatgcgctcaacagcaacattaccgccacgcagactgtcagaatacgcgccgttttcagcgccgccgacagccagccattcaaccgtttttgcagctccggatagttacgctgagtatgtggcgagagagtgatggttttcgccagccagcgggaaaacataccggaaacaaacgctgcgataccaataatcgccaggctgcgcaccgttgcacccatcataaatttcaggctgttgcccggatcgaacaacgaaaagaaaaacagcacgataaaataggcgcttgccagccagtgccacaccagcgcaaaggcgcggataaacaggctgaaaaaggccagcgaatgctccgcgaagttgagcaaatgctgggtaatctcttttttattacgaaagatcaggtacaacgcccagacggtcatgcacagcataatgatgacgttcgccagcgcacctatctgtacattcacctgattagagataatcggcacggccacaatcaggccataacctatcaaactgcttaaccagctcaggcgacgactccagtaacgggcgctctcgtcctgaatcgtgaacgggcgcagctccgccacgtttgggcaaaaaatcaggcgtagtacggctttgaaaaattcaatgagggcaaaggcgttgagaaacaaactttgttggaaagcgatggtgcgactgcctgcattcaggttgtcgcttaatacctggccgacaaataatgtcagggccagtaacagcaggtcgataataaacgccccgataatcatcgccggaagctgcaaccagttgctgcgctcacgatttttttgccgcgcccactgacccattttgcgatacagcggcagtgcgcacaggcgaatcagccagtaaaaaccaaacactaataccgctaacattgaaaaatgggtcagcgcattgctgaaggtttgtggattaaacggcttatgcggggagccggtgatattgcgataaagttgcccgaagcgggcggaaagggcttcaccataatggcggctgacttcggtgaccttttgcagcacggtttgctcttcgaccagcgtcggcggcactatttttggtaccggttcagcagggggcgtagcggcaacggtgcgcaactggtcgatcaactctttacgcgaggtgtcattatccagcacatccgccagtgcgccataggccgcttttttttgttcgatatccggttccggggccggttcagtcgttgagtccgttgtcgttgtggttgtaacgccgggtatggataccgcgtgggcaggtgcgcccagcaggcagaagaggatgaacaggatccaccgcatgactcctccagtgagaaaatagagcaaaaagataagtatagatgctggaggaggggcgattttaaatgagaggaatctggtgtgcctccctttcgggtgaaagggaggaagggatattaagcaggttgctgacaacgtgcgggcttttttgccggatgcggcgtgaacgccttatccgtcctacaagttcatgcaattttaataagttgccagatatcctgtaggcctgataagcgtagcgcatcaggcaatgtgtcttattaagagacgtgctgcaaaaattcctgcaagcgctggctcggcgggttcttgatcaacacctgcggattgccatcttccgcaatccggcctttgtcgataaagatcagccgcgaagctactttctcggcaaaaccgatttcgtgggtcacgatcaccatcgtcatcccttcttcagccagatcctgcataaccttcagcacttcatggcgcagttccgggtcaagagcggaagtcggttcatcaaacagcatcattttcggcttcaccgccagcgcgcgggcaatcgccacacgctgctgttgaccaccagaaagttcggaagggtagtgatgtgcacgttctgccagaccgactttcgccagcagctcacgtgccagtttttccgcctcttctttgttcgcgccacgcacgcgtagcgggccaaacatgacgttttccagcgctgtcagatgcgggaagaggtaaaactgctggaacaccatacctgcttcctggcgaatcaggcgctcgtcaactttcggatcgttaaccttcaggccatcgacaatcagatcgccggaggtgatttcttccagtttgttgatgcagcgcagcagggtcgatttaccggaaccggacggcccgataatcaccacgacttcgccctgggcaatgttcaaatcgatattgtgcagcacctgggttgggccaaagtgcttggagacgtttttaaattcaatcacaggattttcatccttctttccagacgacgcagaataaagctcagcaccagggtaataatcagatagaacaccgccacggcgctccagatctcaagggcgcggaagttaccggcaataatttcttgcccctgacgggtcagttccgccacgccgatcacaataaacagcgaggtgtctttaatgctgatgatccactggttacccagcggcggcagcatacgacgcagtgccagcggtaaaatgacgtagcgaatggtttcccaacgtgaaagaccgagcgccagtcctgcttcacgaaaacctttgtggatagacagcaccgcaccacgcgtgatttccgcaatatacgcgccggagttgatcatgatggtgaccaccgccgcagtaaatgggtcgatgcgtaagtcgttaaacgccatcggcagggcgaaataaataaacatcacctggacgacgataggtgtgccgcggatcacttcaataaagaccagcgcgacgtggttggctatccaacctccgaaggtgcgtgcaaaacctgccagcaatccgattaccagaccgcctgccagaccgaggaccgaaatccacagggtcattttggcaccttcaatcagaagcggaatggcaggccagatggcactccagtcaaactgcatatgttgttcctgttaccgtggtgtaaataatcaaattcagggtaattaatggccccggagcgggtttgcgcccctcaccctaatcctctccccataggggagagggaactgccagtgcgttttacaggtgtagcgttattatttcggttcagtaccgaaccattttttgtagatttcgttgtaagttccgttctcgcgcagggttttcaacgcgccgttgactttgtcacgcagctcgtcgctacctttcgggaacgcaataccgtattgctgcgcttccagagagtcacctaccgctttgaactgaccgttaccggcggttttgatgaagtacagaatgtttggcgtatcgtgcagaacggcgtctgcgcggttggtgcccagttccatataggcgttatcgatgttcgggaactgacgcagatctttagttttgatgtttgctttcgcgtaatcaacggagccagtaccgctcttcacagcaaccactttcccgtcgagatctttcacgcttttcacatcgttattgttagctttcaccatcactaacaggccgcttttgtagtagccgtcagagaaatcgatcgcttttttacgctcgtcggtgatggtaatgcccgccagcgccagatcgacgtttttggtttgcagtgccggaatgatcccactgaaatccatcggcttcagttcgtaatccagcttcagctctttagcgatggcagcccacagatcaacgtcaaagcccacatatttatcgccctgtttaaattcaaacggaacgaaggcggtatccgtcgcgacaactaattttttatccgcggcatgagaagaaaccgcaaaagccagggtcagtgcagccagtgaaacttttaatacagacttcatagcatttccttttttctatccacgggacgatcccctgcgtgacattcacatatatgaaaaaatcgtgccagttttgcaactccttgatttttcgagatgcggcaaaaacgtgatgcacgatttatagggcaataccctgaagatgcaccattctggggcaccaatctggtgcgctaaaattgtgcactcaacacagtgattatttagcgtaaaacctgatgaaaaaacaatctttatgtaacgattgtgtgatgatgtggatacaaaaaatttacttaatcagctggagatagcagatggatgcactaaataagtgcgttgaggtgggctgcaaaacaaaacggcctcctgtcaggaagccgcttttatcgggtactaaagttctgcaccatcagcgatggatttattcgatgttagactcgataaaccacaggaatttatccaggtcgcgagacgcggcggtcaggatatctgcggtgtcgtcatctttcgcttcgccaatcgctttgcgtacgtcattagcgacgattgcgtaacggtcagccagttctttcaggtgatcctgaacgttgtggatgtccagcgggtaacttttcagcggggttttgctgttgataacttgagtggtccccagagctacaccgcccagctgcactgcacgttctgccatggtatccagatgatcgatcagtgcggtgcggaagccatccagcatttcatgtacggcaatgaagttagcgccgcgcatgttccagtgcgcttgtttggtaatcaaagaaagatcaataaactggataacctggcgattcagcaactctactgttgcttttttctcgctgtcggagacatcgttgcgggtataaagcagattggtcgcttttgatttaactaatttagcggtactcataatttcatatcctcttgatgttatgtcccagtaattaacgagattaagtatagcaccggctatgtgttccgctattctggctgttcctatcacactaatagtggtaacaagcgtgaaaaacaaaactaataaagattcaatgagttagatatattgataagaacaattcttatttatctgctcgccaggaattttcggaataaatatgcttttgcataattcgatatataaagacggtgtagaggaaaagtagcgagaaattctgcatggttatgcataaccatgcagaaatgtaaatttaattaatgtctaattcttttattttgctctctttgcgtactgtcagcgtagaccccattgaagcggcgatgatagcgccgagcgccagtagctgtatgggtgtcagtgtttctccgaggaaaatcatcccggaaacggcagccagcgccggttccatgctcatcagcgtaccaaatgtccgtgttggcaaacgggtgagggcaatcatttccagcgaataaggcagagcggtcgagagaatagcgacagccagacccaatggaataaccgaccagtgccagagtgcttcaccagcctgaagcgctccaattggcacgaaaattaacgctgcaatcaacgaaccaattgccaccgtcgcagggccatgttccgctcctgcgcgttgcccacttaaaatgtaaatagcccaacaagccccggcccccagtgccagcgcacagccggttaaatcgacatgggaaacgtcttgccccagcggtagcaggaaccacagaccaagaaccgccagcacaacccagacgaaatctaccgggcgacgagaagagaacagcgccaccgccagtggtccggtgaactccagcgccaccgcaatacccagcggtactgtctgaatagaaagataaaaaagataattcatcccacccagcgaaacgccgtaaaacaacagcggtaaccgttgctctttggcaaagcgcagtcgccatggcttaaagaacgcgatgaggatcagcgttcctaatgccagacgcagcgcagtgacacccggtgcgcccaccagaggaaaaagtgacttagctaacgaggctccaccctgaatagacgccatggcaacgagcaatatgactattggtaaccagaccggcattttacgtaatgaaccaggcatcctttctcccacaaatatctagacttaagtaaagcgtggagtgtactggatatacccaatgctggttgagcatttgttgaaaaaattttcccccgttttgactaaaatgcgccaggattgatggaatcattagtctggtgattaggaataatctggatgaatgacagggaaaacatgcgtaatacttacgcagttctctgaaaaagtgatttaaatttagatggatagcggtgtatggaaacgttctgttacatgaaatggcccgttagacatcacaaatcgcgaagagtttcccattaatttttgatatatttaaaacttaggacttatttgaatcacatttgaggtggttatgaaaaaaattgcatgtctttcagcactggccgcagttctggctttcaccgcaggtacttccgtagctgcgacttctactgtaactggcggttacgcacagagcgacgctcagggccaaatgaacaaaatgggcggtttcaacctgaaataccgctatgaagaagacaacagcccgctgggtgtgatcggttctttcacttacaccgagaaaagccgtactgcaagctctggtgactacaacaaaaaccagtactacggcatcactgctggtccggcttaccgcattaacgactgggcaagcatctacggtgtagtgggtgtgggttatggtaaattccagaccactgaatacccgacctacaaacacgacaccagcgactacggtttctcctacggtgcgggtctgcagttcaacccgatggaaaacgttgctctggacttctcttacgagcagagccgtattcgtagcgttgacgtaggcacctggattgccggtgttggttaccgcttctaatcactttggtgatataaaaaatccgcctctcggggcggatttttgtttttaaggtttcgggtcgaaaatatcggttccgagatggttgtaatccaccttctgtaactggaagttggtgatgtatatcggcccggctttcttctcagatataaacgggtatttgatgttaatttccttcgctttaatccccgtccactgggagaaaaagcctaagaagtcattggctgagcggcgggctttaatcacacgatgcgctttatcgtcgctggaaatgaccataaaaggcacctggaaattttgctgatatttatcatcatgggcaaggtattgcacgtctttaccgcgctctttaaaggccagaccgtggtcagaaaagtaaaccagcgagaagctgctgccgctgttgcgtaactgatcgtacagcttgcgcagtaaatcgtccgtttgcgtcatggtatagagatagcacgacgtttctttcgattgcacaaaggtttcgtattttccttgtgtcctgtcgcaggcctgcggatgtgagcccatcagatgtagaacaatcagctgcggttgcgagtgctcttgcgccagcacttgagcggtcatatccagtaacgcttcgtctttggtgtttttatctgcttcaaaattaccttctttcaggaagtacacttcatctgctcgtttggcgatgctggcgatagcggtatcgtattcgccgatttgaccctggttggaaaaccaccaggtctggaagcccgcgcgatttgccagggtgacaaagttatcctgaaactgtggtttgccatcgacaacgcgattgagcgttaagccaagcgatttctgcgtggagccactggcggcaatgtagtcagcaaatatcaaaccgttaacgctgctggcaaacggggtattgtcccagtgaccgccaaaggcaccgagggcatcgcgacgcgcgctttcaccgatcaccaccacataggtctgatacttcggcttaacggcagtgaccgtccaggtatctttcattccggaaagttttgccatccgttcttgctcttcaatcacctcgttattattgacgatgacatccttagcaaaacgaaataccggatagccagtatctttcagtttaaatacgccaccccaggccaggttttgcacgggagcaacaaaaaatgtcgccacactgaataccagacacaggctgtcgaaggtattccagcgcgctttttcattctctttttttcgcctgattgctattacgccgagcgcaaaaataaataagccgaccaggtagctgtaccacggaaaaatcgtcaggatttcggtcgactcttccatattggtggagtgcaatgccagcaatgtattgaaattaggcgcgccgtaggcctgagcaaaagggaaataacaagccgccaccagcgaactgacaccgaccagaactttttgtacgcgaggcaatgttcgccatagcaaaagcaaaatagccgtaaacgcagcggtgtagagcaaactgaaggggtaacctaagccgaggttaattaatagcgactgtaaaaagtagaacgcagtccacgggctaaatacccggctacgggtaacaagcgattctttgagggttaaattcatatgccactatcgtaacaaacgccatgtgcttaccctggcgtcaagggtcaatacctgcaagagtgcgtgaagagtggaaaggggtccgcatccgcgagccgcaatatacgcagggctgcaagaagatagagcgagccgccgttcaggtcaactactgacgaacaaatcttttgcgaaggggattgcaaatccgacaaaaagtggggtttttcagaccaaaacgcgttatgcctgcatgaaagcaggagtgaagcggcgtaccgcgacgccgctatttatcggaaggtttatcttgctgcggtttgttgttgaccatatcgcacaacatagagagcagcattaaccgtactttaaagggagaatgactaaacacgcgcatacacctcttgaactcattcataagacctcctgacttgctaatcccgtcgatccttgagggatgattgcattacatacagatatagcacaggctatattatatagctattgctaaaacgttaattttttgtaccttcgcaactctggtttacaatgtgcgcacgaaatgagaacgctatgtatgcgtcaccataatgaggaagcacaatgagtcgtcgcgcaggtacgccaacagcaaaaaaagtgacgcagttagtgaacgtggaagagcacgttgaagggttccgccaggtcagagaggcgcatcggcgcgagcttattgatgattacgttgagctgatttctgacttgatcagggaagtgggggaagctcgtcaggtggacatggctgctcgtctgggagtttcgcaaccgacggtggctaaaatgcttaagcggctggcaaccatggggctgattgaaatgatcccctggcgtggcgtgtttttaacggcagaaggagagaagctggcgcaggaaagccgcgagcgacatcagatagtcgaaaatttcttgttggtgttgggcgtcagtccggaaatcgcccgtcgcgacgcggaaggcatggagcaccatgttagtgaagagacgctcgacgcttttcgtttgtttacccagaaacacggtgccaaatgagcctgccttttttacgcacgctgcaaggcgatcgtttttttcagttattaattcttgttggtatcggattaagctttttcgtgccctttgcaccgaaatcctggcctgctgctatcgactggcacaccatcatcaccttaagcggcctgatgctgctgaccaaaggtgtggagttaagcggttattttgatgtgctggggcgcaaaatggtgcgccgctttgctacggagcgtcggctggcgatgtttatggtgctggcggcggcgctgctttctacctttctgaccaacgatgtcgcgctgtttattgttgttccgctgactatcacgctaaaaagactgtgtgagatcccggttaatcggctgattatttttgaggcgctggcagtcaacgctggttcgctactgacgccaattggcaacccgcaaaatattcttatctggggacgttctggtctttcgtttgccggatttattgcccaaatggcaccgctggctggcgcaatgatgctgacgctcctgctcctgtgctggtgttgtttccctggaaaggcgatgcaataccatacgggggtgcaaacaccggagtggaaaccgcggctggtgtggagttgtctggggctgtatatcgtctttctgacggcgctggagttcaaacaagagctgtggggactggtgattgtggcggcaggctttgcgctgctggcacgtcgcgtggtgctcagtgtggactggacgctgctgctggtgtttatggcgatgtttatcgacgtccatttactgacccagcttccagcgttgcaaggcgtgttgggtaacgtgagtcatctatctgaacccgggttatggttaacggcaatcggtttatcgcaggtgatcagtaacgtgccgagtaccatattgttgctgaactatgtgccgccgtctttattactggtatgggcggtaaacgtaggtggctttgggttattacccggatcgctggcaaatttgattgcgctacgtatggcgaacgatcgccgcatctggtggcgtttccatctctattcaataccgatgctgttgtgggcggcgttggtgggatatgttttgttagttatactcccggccaactagggtctggcaaataaaaaaggcggattatgagtccgccttttgctttaagttttgaagattaattcagacgaaccggcatcccggagcggtttttaatcgcttcatcaagaacaacctggtcaacatctggctgaccggtcactgtctgcacgctcttcgtcagggtaattggcacaatttcctgaccttcaaactgggcttcggtggtagacagcgggttatggacttcaatataacggctgccgtctggctcggtggtcgcttttaccggctcatcaataaactgtacgcgggtaccgaccggtactttctcgaacaggaatttgatgtcttcgttacgcagacgcacacaaccatgacttacacgcaggccgataccgaagttggcgttggtgccatggatagcatacaggcgaccgatatagagtgcatacagccccatcgggttatccggacctgccggaacgacagccggaagcggttcgcccgcagcgcggtactctgcgtgcattttggcggtcggcgtccaggtcgggcctgcttttttacgctcaactttggtggtccagttgataggcgtatctttgcctaactgaccaatgccgatcggcagcacgataacggtgttggtccctttcggatagtaataaagacgcatctcagcactgttaatgacgatgccttcatgaacggtatccggcaggatcagctgctgcggaatgttcagtacagtaccgcctttcggcaggaaggtatccacacccgggttcgcttccatcatattggaaagccccatctggtactcggcggcaaaatactccagcggctgagtgttaccttcaggaatggtgatcacctgattctgaccaaccaggcgactcccgtcggttggcagaggataagttaccgcagaggcggtactgcaaaagccgacaacagcgaaggccgctgcgaataatgttttcaatttcatattcatgttaagcgagattttgtgcctggcaggccattgggttgagaatattagagtattggaagcgcattataagttcattccagctcacagtgaaatcagatgtgtacgaaatcacattttttgcctttggcttgagtgtagaccttaagcgaggagcaggatcttctttcagacttatggcataatgcgcggtttgtcatatctcttttcaggatacgcctgtgttagtttccagtaacgtcaccatgcagttcggcagtaagccgttgtttgaaaacatttccgtcaaatttggcggcggcaaccgttacggcctgattggcgcgaacggtagtggtaaatccacctttatgaagatcctcggcggcgaccttgagccgacgctgggtaacgtttccctcgatcccaacgagcgcattggtaaactgcgtcaggatcagtttgcctttgaagagttcactgtgctggatacggtgatcatggggcataaagagttgtgggaagtgaagcaggagcgcgaccgcatctatgctttgccggaaatgagtgaagaagacggctataaagtggccgatctggaagttaaatacggcgaaatggacggttactctgcggaagctcgcgccggtgaactgttgcttggcgtgggaattccagtggaacagcactacggcccgatgagtgaagttgctcctggctggaagctgcgtgtgcttctggcgcaggcgctgtttgctgatccggatattctcctgctcgacgaaccgaccaacaacctcgacatcgacaccattcgctggctggaacaggtgctgaacgagcgtgacagcaccatgatcatcatctcgcacgaccgtcacttccttaacatggtctgtacccacatggcggatctggattacggcgagctgcgcgtttatccgggtaactacgatgagtacatgacggcggcgacccaggcgcgtgaacgtctgctggccgataacgccaagaagaaagcgcagattgctgagttgcaatctttcgttagccgctttagcgccaacgcctcgaaatctcgccaggcaacttcgcgcgcgcgccagattgataaaatcaaactggaagaggtgaaagcctccagccgtcagaacccgttcatccgttttgaacaggataagaaactgttccgtaacgcgctggaagtggaaggtctgaccaaagggtttgataacggtccgctgtttaaaaatctcaacctgctgctggaagtgggtgaaaaactggcggtactgggtaccaacggcgtcggtaaatcaacgctgctgaaaacgctggtgggcgatctgcaaccggacagcggcaccgtaaaatggtctgagaacgcgcgcattggttactatgctcaggaccacgaatatgagtttgaaaatgatctgaccgtgttcgaatggatgagccagtggaagcaggaaggcgatgacgagcaggcggtacgcagtattctcggtcgtttgctgttcagccaggacgacatcaaaaagccagctaaagtgctttccggtggggaaaaagggcggatgctgtttggtaagttaatgatgcagaagccgaacattctgatcatggacgaaccgaccaaccacctggatatggaatccattgagtcgctgaacatggcactggaactgtatcagggcacgctgatctttgtttcacacgaccgtgagttcgtaagctccctggcgacccgcattctggaaatcaccccggaacgcgtgatcgactttagcggtaattacgaagattacctgcgtagtaaagggatcgagtaagtgattatccgtcaccccgatactgtcggggtgacggcggctgatgacaaatgcaaaatagcctgatgcgctacgcttatcaggcctacgcagtacctgcaatatattgaatctgcaggactttgtaggccggataaggcgttaacgccgcatcaggcattaacaaagcgcatttgtcagcaatctgagtaacgtcgaatcgattttcttaatcccacatcaattcacttccattaattctcaaacatccatgcccaacgctcgcttaccgtgaatgttgaggtcggcaagcgtaaagcgtccttcccagtttgtttcatagtcctcgcgcgggaagtcgcccggcgatgcgcctttttccagtgcggccttcaccttgtgcgcgtaggcaagatttttctcgcacatcggtgccgcaggaatgtacatcacgttgccccaaccttgttgattttcaacgggggcaacggaatggatgacgtcgcagtgccaccagacggagtctccggcttcgagttttggaatgctggttaacgcctcaatcaacagtggatgccattgctctgataccggcaatactcttccgggcgctacgccgcacagttcatcctccggcacatcatcaagcagcggacgtaacagtacgtacgccatagcttcaggaatgggcacgacgtgcagcagcccctgaccaggcagcatatcagagagcgctgtccagccctggaatgtccgaaacacggaacatttggtggtgttgtccaccgtgtactcttcaacttccgtacgatgtgccgcatgccagggatcatattgcgccagattgccattaaagacgttggcgaaaacgcgctgatacgctggaagcagccagcgttccagtgccccggagtcggtatgcgctccaagacctttggaggtcgttccgggcggacggcggcggatacggtcagggtagatgacgctcacatccgggttaaaccattgctttccatcactttcaaatgtccacagacgattgagaaacgactgcgcattcgccatttcttcactctggcgggcctgcatttgcgcctgcgaccagtagatggggtaaatctcgggacgtgaagcgctgagcgtcccgaagaaattatcgccggggcctttgtagacctcgtcaaagcggttgcggtccagatagtccagcatcgactgatcccagcctagcgcttgttcgcgggggaaatggccttttatcaccgcacaaccgcgacgtttaatctgttcgcgctgctctgcagtaacatgacctgctttgatatcggcataagacagcaccggccagacggcatcgccctgtgctttgagtgcgttgatttcagccactcgcgtggcaatgtcatcgcttagctgattaaagatctgctggacgtcgccaagctgcgcccgcagcgcgtgcttcatctgacggatagctgctttgtgatcggcaggcaatgtgtcgctggtaaaagtagaagccataaccacctctcattaactttcattcgaaaccattctgatttgcatgtgacaatataagttataaataagttaatgcaagtttaatgatttgatgtgatgtacaggatgtaaaaagaagggaaaaccggagcgcacggctccggtagagaggtcagctgttaaaaggggatgtgttatccagcaccgcctgaatcacattcagcgcgccttcatgattattatcatcggtagcgtaacgggcgatttgtttaatgttttccgcagcattgcccatcgcaaaggaataacgcgccattttcagcatctccgcatcgttaccgctgtcgccaatcgctaccacattttgcggtgacagatcccagcgtttcagtaaccgcgaaataccgtttgctttatgtagaccgggaataatcaggtcgataaagccaaaaccactggtaacgggtttcataatgccatcgagcgctacgtgcagtttgtcgatcactaacgggatttgttcatccggcaggttgagcgaaaacttgaacagtacgtcgtcaatctcctgataatcttttacaggtttcaggcgatggtagtgttttgccatcagtgcgacaaatgcttcgggggcattttcgctgacatatgcactttgcagaccgcaggcgacaaaattgagttgcttatcttttagcaactcgccaataacaatccgcgattcatgtcgggtcagttcgccgtggaacaactgcttgccatgttcgtaaaccagtgcgccgttttccgcgacaaaagagatctcatcctttagctcaggaaagaatgaaataagctggtaatactgattaccgctggcaacaacgaacttaatgccgcgctttttcagttcctgatattgcgccataaaacgtggttggttgtacgttttggcgtcgttaagaaaagtaccgtccatgtctgtgacgataacttttacgctcataggtgtgctcctggctcgaaaatgaaaccgtaacagtgtaataacaatgtgacgcagagcacaaattatatttcgaatgaaagtaaggatgaaattgatgatgtgaatgatttagcccggcgacgacgccgccgggccgaggagattacagcatatgttcagtacgggcgatgatatcgtcctgagcgtctggagagagcgcggtgaagaacgcggaatagcccgcgacacgcactaccagatcgcgatactgatcgggatgttttttcgcatccagcagcgtttcgcgggaaacgatgttgtactgaatatgccagcctttatgcacttcaaagaaggtacgcagcaggatcatcagtttctgcttgtcagattcgttctccagcgttgccggattcagtttctggttgagcaacacgccgccgagaatcgctgccgtaggcagtttacccactgagccaatgaccgcagtagggccaagatggtcagtaccggaggccgggcttgcgccttctgccagcggggtgtgggctttacgcccgtccggtgttgccatagtctgcgcgccaaacggtacgttagcggagattgatgacgtacccgcgtaatagttgccgccaaccggaccacgaccgtagcgcggattatggtactgtttcagttcgtcgatataggtctgataagcgcgagccagcagcgtatcgacagtatcatcgtcgttgccgtacttcggcgcaccgttaatcagccgctgacgcagctgctcgtgagtcaggccgtcgaagtcatctgccagtgcggcagcaagctgttgctgaccaatcgcaccttgttcaaacaccagtttcttcactgccgccaggctgttgccgaggttggcaatgccgacctgcaggccagaaacccagtcatatttcgcgccgccttgcttgatacttttcgctcgctcaatacagtcatccaccagcgccgagcagagaatatcgtgcacgttctcttccagcatggtgtcgacgacatattcgatttcgattgatttgcgggtgtagtaacggatttgcgtatcccacgcgtccatcacttcatcgaagttgttgaagttacctgccgacaacgctttttcttgtggcaggaacactttgccgctggtggcatcatgcccgccttccagcgccgccagcatcacgcgggcgaagttgataaagctcatgccggtacagcgatagccccatttgccaccgacggcggtttctatacaaccaatcgctgcgtagtcataagcgtcctgcggttcaataccgagtttaataaattccgggatcacgatttcgtcgttgttgaacgccggcatcccgaagccgcaacggatcacctgtacgcaggcgtcgaggaaatcgttgctcattcctgcatggtaacgcacgctgaggttaggctgagtggaacgcaggcgaccgcaggattcgaggatcgcgtaagagagtggattcaccgcgtccattggttgaccatcaaccagattttgcccgccaatagtgacgttctgatacagcggacttcccgcagaggcttttgagtgtgagccggagcggatcttgttcacttccagcagtttcagccagcagctatgcagcatctcgatggcgtgttcgcgatccagcgtctggttgagttcaacgtcgcggcgatagtacgggtagagatactggtccatacgaccaaacgatactgagtgaccgttagattcgatctgcaaaatcaactggatgaagtaacacagttgcagcgcctgccagaaagtctgcggcggctggtgggcgataagatcgcagttttctgccatcgccagcagttcatcgcgacggctttcgcgggtttcggtcgcggccatttcacgcgccagggcagcgaaacgttcaatgtgttcactgactgccaccagcacgatatcaatcgctttcaggaattgctcaccgtgtaaatcttccagcaccgtcaggttgatgcgcgagcgacgttccgctacttcctcgcgcagaccatcaagccctttttccagcagcagcgggaaattcaccgccaggtgcgcatcgccggaggtcatattgccttccgctttaatgattccggtcgccagcagacctttttgctcatcggtaaacatgccgtagcagcgatcctgtacggtctgaccgcgccaccacgggcacacttcatgcagaacgcgtttgttctcttcgctcaccgcaaagccagcaccgggacgatctgccagatcatcaatctctttttcgatccacgagacagtatattccgggaagatcggcgcggcgcgaacttcgcttgcctggttgccaatgatcaactcatcgtgtttgatccagatggtgcgattcgccaggtgatgcgccagtgccagcgcgcgacgtaccgggatcggcttatcgagatgttgttgatacatctcggtatagtgctgcgcgcgctcggtacagactggcggtttcacaatatgcaccagcgcatttttgtgcgctttaatgcggtcgctgagcgtgtccagtttcagtgtggtcatggttgttatcctcgtaaggtcgcggttaaccctttctggcaggcatactgctgggcaaagtcgagcagttctggcgcatcaagcggtttttccggggcgtcatagggcagattaagtaagtgatatttgttgatgcccagcgtgtggtagggcagaaaatgaatttcgccaacgtgcagctcgtcggcggcaaaatcggtaatggcttttacagaggtttcgtcggcattaaagccctgaatcagcggcacgcggataatgatttttttgcccgctgcggcgagttttttcaggttatccagcactctggcggcgttaccgtcggtccactgtttaaacggcgcgtcggcaacgtgttttaaatcggcaagaaacagatcgatatagggcagagaaggggcgatatatttccacggcacatgcagacaggtttctaccgcagtatgaatgcctgcctcgtggctggcttgcagtagcgccatcgccatttccggctgcataaagggctcaccacccgaaagcgttaaaccgccgccgctgcgatcgtaaaacggtttatcgcgcagaacggtcgtcatgatctcctcaacgcttttcacttcaccacacacggttaatgcctgtgtcggacagcagtcggttaacgccgtcagatgctccggggttaacttttcccgatgaataagcaaaccattcagcgcgcgctcaatcacttccggcgcggccttagcgcacagctcgcagccttccagacacagtcgtgcgtcatacagcagatcctgcgtgcgggcgcggctttccgggttctgacaccagcggcagcccagcgaacagcctttaagaaatacgaccgtgcggataccggggccatcatgggtcgagtagcgctgaatattgaaaatcatagttgcctctctatttcgttcaagcattaaaatactttcgaatgaaagttagattgatgtgcgtcaactgttcagagagttttcccgtgatagtctacattcagacaaaaagtacattttgaggatggttatggaactgtatctggatacttcagacgttgttgcggtgaaggcgctgtcacgtatttttccgctggcgggtgtgaccactaacccaagcattatcgccgcgggtaaaaaaccgctggatgttgtgcttccgcaacttcatgaagcgatgggcggtcaggggcgtctgtttgcccaggtaatggctaccactgccgaagggatggttaatgacgcgcttaagctgcgttctattattgcggatatcgtggtgaaagttccggtgaccgccgaggggctggcagctattaagatgttaaaagcggaagggattccgacgctgggaaccgcggtatatggcgcagcacaagggctgctgtcggcgctggcaggtgcggaatatgttgcgccttacgttaatcgtattgatgctcagggcggtagcggcattcagactgtgaccgacttacaccagttattgaaaatgcatgcgccgcaggcgaaagtgctggcagcgagtttcaaaaccccgcgtcaggcgctggactgcttactggcaggatgtgaatcaattactctgccactggatgtggcacaacagatgattagctatccggcggttgatgccgctgtggcgaagtttgagcaggactggcagggagcgtttggcagaacgtcgatttaaccggacgttctgcatcctcataaattgctgatgacgtggcggagtgccgcgtcttatcaggcctggaggtggcaattactgcccacacacctcacaccccggattacgcatcagtttcatttcgcgaaactgacaggtcatcgcatcgtacatgacgattttcccgctggccggtttgccataacctgccagcattttgatcgcttccattgcctgcaacgaaccaattacgccgatcaacggtgccattacgcctgcttccacgcaggttaatgcattttcaccaaacaaacggctaaggcagcgatagcacggttcaccgtcctgataagtaaagacggtgatttgaccttccatacgaattgccgcgccggaaaccagcggtaccttcgcggcaaaacagcctgcgttcagttgattacgtaccgcaacgttatccgtacagtcgagcaccagatcgtgttcagcaatcaatgctgcaagttctgcgtcatccagcagtgcattgactggcgtaatcgcgatatgtgggttgatccgcgtcagggcgtcacgggcggattccaccttcggttgcccgaccgtggcatcactgtgcagtgtctggcgttgcagattcgagagcgaaaccgtgtcgaagtcgagcagcgtcaggttaccgacaccggcgcttgccagatactgcgaggctgcacagccgaggccgcccaggcccactatcagcacgcgagaatctttcagcgcctcctggccgtcaaaatcaaagccgcgcagaatgatttgccggttgtagcgcagcatctcctgatcgctgagttccgccattacaggcctccgaacaacgcgttaaacggttctacttccacccattcgcccacttccacattgccgcgatcgcgttccagcacgataaagcagttgccgaggctaaaggagctaaatatatgtgaaccctgatgtccggtggtcgtcacttccagttcgccatcggcgttgcgttgcagcacgccgcgctggaaatcaagacgtcctggcgtttttttcaggcgggacgctgtgcgtacgcgctggcgcgcgggcaggccgctggcggtgttaccgcttagttttgccagcaaaggctgtaccagttgatagaaggtcagcgtcgctgaaaccgggttgcccggcaggccgcagaaccagctattgctgagtttaccgaacgcgaacggtttacctggtttaatcgccagcttccagaaggcgatctcccccagctcttcaagaatcgttttggtgtaatccgcctcacccactgaaacaccgccggaactgatcaccacatccgcctggctgtcggcttcaataaatgcggcgcgcagggcatggggatcgtcgcggataatccctaagttaattacctcgcatcccaactgttctaacatcaggtgtacggcgagacggttggtatcgtagatttggccgtcgcccagcggctgaccgggcaactggagttcatcaccggtagaaaaaagcgctacacgcactttacgaatcaccggaacttcggcaatccccagtgaagcaattactggcagctctgcggtagtcaggcgagttcccgccgggaaaacaaccgcacctgcagagatatcttcaccgcgacggcgaatattttgcccgctacgcacttcagcagtaaaacgcacgccattgtccatttgttcagtctgctcctgcatcaccaccgcttcgcagccttccggcaccggcgcaccggtcataatacgaatgcaggtacccgcaggccattcaccatggtatggctgaccggcaaaggatttaccggcaacgggcagcggttgcccggaggcaatatcggctaaacgcaccgcgtagccgtccattgcggagttatcaaaccccggaacatcaagcggcgaaacgacatcgctcgccagaatacgaccaaaacactgtaccagtggcagcgtttcctgggcggtcagtggggtgacgcgagaaagcatctcattaagcgcggtgtcgagcgacatcaatccggtggtaaattccatgaaaacactcctgcggaggcaaaatcgaatttgcctattatgtcagaaaaacgccacagactgtatgccacctcgggcgtagcgctgggtcctgcctttacatgccatatccatctttctatattcaaaaattgaatgagtaattcataaaaattctgatatttatagcaaaagtggcgaaccacccttaatggacgaatactatgggcaaagcagtcattgcaattcatggtggcgcaggtgcaattagccgcgcgcagatgagtctgcaacaggaattacgctacatcgaggcgttgtctgccattgttgaaaccgggcagaaaatgctggaagcgggcgaaagtgcgctggatgtggtgacggaagcggtgcgtctgctggaagagtgtccactgtttaacgccggaattggcgctgtctttacgcgtgatgaaacccatgaactggacgcctgtgtgatggatggtaacaccctgaaagccggtgcggtggcgggcgttagtcatctgcgtaatccggttcttgccgcccggctggtgatggagcaaagcccgcatgtgatgatgattggcgaaggggcagaaaattttgcgtttgctcgtggcatggagcgcgtctcgccggagattttctccacgtctttgcgttatgaacaactactggcagcgcgcaaggaaggggcaaccgtcctcgaccatagcggtgcgccactggatgaaaaacagaaaatgggcaccgtgggggccgtggcgttggatttagacggcaatttggcggcagccacgtccacaggcggaatgaccaataaattacccggacgagttggcgatagtcccttagtgggtgccggatgctacgccaataacgccagtgtggcggtttcttgtaccggcacgggcgaagtcttcatccgcgcgctggcggcatatgacatcgccgcgttaatggattacggcggattaagtctcgcggaagcctgcgagcgggtagtaatggaaaaactccctgcgcttggcggtagcggtggcttaatcgctatcgaccatgaagggaatgtcgcgctaccgtttaacaccgaaggaatgtatcgcgcctggggctacgcaggcgatacgccaaccaccggtatctaccgtgaaaaaggggacaccgttgccacacagtgatgaacttgatgccggtaatgtgctggcggttgaaaatctgaatattgcctttatgcaggaccagcagaaaatagctgcggtccgcaatctctcttttagtctgcaacgcggtgagacgctggcaattgttggcgaatccggctccggtaagtcagtgactgcgttggcattgatgcgcctgttggaacaggcgggcggtttagtacagtgcgataaaatgctgttgcagcggcgcagtcgcgaagtgattgaacttagcgagcagaacgctgcacaaatgcgccatgttcgcggtgcggatatggcgatgatatttcaggagccgatgacatcgctgaacccggtatttactgtgggtgaacagattgccgaatcaattcgtctgcatcagaacgccagtcgtgaagaagcgatggtcgaggcgaagcggatgctggatcaggtacgcattcctgaggcacaaaccattctttcacgttatccgcatcaactctctggcgggatgcgccagcgagtgatgattgcgatggcgctgtcatgccgcccggcggtgctgattgccgatgagccaaccaccgcgctggatgtcactattcaggcgcagatcctgcaattaatcaaagtattgcaaaaagagatgtcgatgggcgttatctttatcactcacgatatgggcgtggtggcagagattgccgatcgggtactggtgatgtatcagggcgaggcggtggaaacgggtaccgtcgaacagatttttcatgcaccgcaacatccttacacccgtgcgctgttagctgctgttccgcaacttggtgcgatgaaagggttagattatccccgacgtttcccgttgatatcgcttgaacatccagcgaaacaggccccccccatcgagcagaaaacggtggtggatggcgaacctgttttacgagtgcgtaatcttgtcacccgtttccctttgcgcagcggtttgttgaatcgcgtaacgcgggaagtgcatgccgttgagaaagtcagttttgatctctggcctggcgaaacgctatcgctggtgggcgagtctggcagcggtaaatccactaccgggcgggcgttgctgcgcctggtcgaatcgcagggcggcgaaattatctttaacggtcagcgaatcgataccttgtcacccggcaaacttcaggcattacgccgggatattcagtttatttttcaggacccttacgcttcgctggacccacgtcagaccatcggtgattcgattatcgaaccgctgcgtgtacacggtttattgccaggtaaagacgcggctgcacgcgttgcgtggttgctggagcgcgtgggcctgttacctgaacatgcctggcgttacccgcatgagttttccggcggtcagcgccagcgcatctgcattgctcgcgcgttggcattgaatccaaaagtgatcattgccgacgaagccgtttcggcgctggatgtttctattcgcgggcagattatcaacttgttgctcgatctccagcgtgatttcggcattgcgtatctgtttatctcccacgatatggcggtggtagagcggattagtcatcgtgtggcggtgatgtatctcgggcaaattgttgaaattggtccacggcgcgcggtcttcgaaaacccgcagcatccttatacgcgtaaattactggcggcagttccggtcgctgaaccgtcccgacaacgaccgcagcgtgtactgctgtcggacgatcttcccagcaatattcatctgcgtggcgaagaggtggcagccgtctcgttgcaatgcgtcgggccggggcattacgtcgcacaaccacaatcagaatacgcattcatgcgtagataacattcaggcggagaataaaatggcaagagctgtacaccgtagtgggttagtggcgctgggcattgcgacagcgttgatggcatcttgtgcattcgctgccaaagatgtggtggtggcggtaggatcgaatttcaccacgctcgatccgtatgacgcaaatgacacgttatctcaggccgtagcgaaatcgttttaccaggggctgttcggtctggataaagagatgaaactgaaaaacgtgctggcggagagttataccgtttccgatgacggcattacttacaccgtgaaattgcgggaaggcattaaattccaggatggcaccgatttcaacgccgcggcggtgaaagcgaatctggaccgggccagcgatccggcgaatcatcttaaacgctataacctgtataagaatattgctaaaacggaagcgatcgatccgacaacggtaaagattaccctcaaacagccgttctcagcgtttattaatattcttgcccatccggcgaccgcgatgatttcaccggcagcgctggaaaaatatggcaaggagattggtttttatccggtgggaaccggaccgtatgaactggatacctggaatcagaccgattttgtgaaggtgaaaaaattcgcgggttactggcagccaggattgcccaaactggacagcataacctggcgtccggtggcggataacaacacccgcgcggcaatgctgcaaaccggtgaagcgcagtttgctttccccattccttacgagcaggccacactgctggagaaaaacaaaaatatcgagttgatggccagtccgtcaattatgcagcgttatatcagtatgaacgtgacgcaaaagccgttcgataacccgaaggtccgtgaggcgctgaattacgccattaaccgtccggcgctggtgaaagttgcctttgcgggctatgcaacgccagctactggtgtggtaccgccaagtatcgcctacgcgcaaagttataaaccgtggccttacgatccagtgaaagcgcgcgaattactgaaagaggcgggatatcccaacggtttcagtaccacgctgtggtcgtcacataaccacagcaccgcgcagaaagtgctgcaatttacccagcagcagttagcgcaggtcgggattaaagcccaggtgactgcgatggatgccggacagcgggcggcagaagttgaaggtaaagggcaaaaagagagcggcgtgcggatgttctacactggctggtcggcttcaaccggcgaagcggactgggcactatcgccgctgtttgcctcgcagaactggccaccgacgctgtttaataccgcgttttacagcaataaacaggtggatgacttcctggctcaggcactgaaaactaatgatccggcggaaaagacccgcttatataaggcggcgcaggatatcatctggcaagaatcgccgtggatcccgctggtggtagaaaaactggtgtcggcacacagtaaaaacctgaccggtttttggatcatgccagacaccggcttcagctttgaagacgcggatttgcaataagcaacgcagggagtggaatgcttaattacgttatcaaacgcttactggggttgattccgacgctgtttatcgtctcggtgctggtgtttttatttgtccatatgctgcccggcgatccggcgcgattgattgccgggcccgaagctgatgcgcaggttatagaactggtgcgtcagcagctggggttggatcagccgctgtatcaccagttctggcactatatcagcaatgctgtgcagggggattttggcctgtcgatggtgtcgcgtcgtccggttgccgatgagattgccagccgctttatgccaacgctgtggctgaccataaccagtatggtctgggcggttatatttggtatggcggcgggaattatcgccgccgtctggcgtaaccgttggccggatcgattgagtatgaccattgcggtgtcggggatctcgtttccggcatttgctctggggatgcttttaattcaggtattctccgttgaactgggctggctgcctaccgtgggagcagacagttggcagcactacattttaccctccctgacgctcggcgcggcagtggccgccgtgatggcgcgctttacccgcgcgtcgtttgtcgatgttttaagcgaagattatatgcgtaccgcgagggcgaaaggggtgagcgaaacctgggttgtcctcaaacacgggctacgtaacgcgatgatcccggtagtgaccatgatgggcttacagtttggctttttgctcggtggttccatcgttgtggagaaagttttcaactggccgggacttggacgcttactcgttgactccgtagaaatgcgtgattacccggtgattcaggcggaaattctgcttttctcgctggaatttattcttatcaacttagtggtggatgtgctttacgccgccattaacccggctatcaggtacaagtaaggatgcgactatttaactggcgacgtcaggcggtgttaaacgccatgccactggtcaaacctgaccaggtacgtacaccgtggcatgaattctggcgacgatttcgccgtcagcatatggcgatgaccgccgcattattcgttattttattgattgtggtggccatttttgcacgctggatcgctccctatgacgccgaaaattattttgattatgacaatctgaataacggaccttctttgcagcactggtttggcgtcgattcactggggcgtgacattttcagccgtgtcctggttggtgcgcaaatctcgctggcggcgggcgtgtttgccgtgtttatcggtgcggcgatcgggacgttgctgggcttgctcgctggatattatgaaggctggtgggatcggctgatcatgcgcatttgcgatgtgctgtttgccttcccgggtattttactggcgatcgctgttgttgcggtgttgggaagcggcattgctaacgtgattattgcagtcgccattttttccatccccgcgtttgcccgcctggtgcgcggcaacacgctggtgttgaaacagcaaacctttattgagtcagcacgcagtattggtgccagcgatatgaccgttttgttgcgtcatatcctgcctgggaccgtctcttctatcgtggtgtttttcaccatgcgcattggtacctcgattatctctgccgccagcctctcatttctcggcctcggtgcgcagccgccgacaccagagtggggagcaatgctcaatgaggctcgagcggatatggttatcgcgccgcatgtcgctgtttttccggccctggctatttttctgaccgtactggcgttcaatttgttgggcgatggtttacgcgatgcgctggatccgaaaattaaaggatagttacgtttgaatattgcttgaaagggtaatcacctcacaggaaattattgccctaagcaagtgttgtaactttctgctgattttgtagaatcgggtaatttggttaaaaagccgcagcaagggacaatttttgcagcggcacagcgttcagatagttattttgttaaatgtattaacatgctgagtttatacgaaaagataaagataaggctgataattttatttttattggcagcactgtcatttattggtctttttttcatcattaactatcaactggtatcggagcgcgcggtaaaacgtgccgatagccgctttgaacttattcagaaaaacgttggctatttctttaaagatattgaacgttcggccctgacattaaaggactcactgtatttattaaaaaatacagaggagattcaacgcgccgtgattcttaaaatggaaatgatgccatttttagactcggtgggactggtacttgatgataataaatattatcttttttcgcggagggcgaatgataaaatcgttgtttatcatcaggaacaagtaaatggaccgcttgtcgacgagtcagggcgggttatttttgccgattttaacccatcgaaacgaccgtggtcggtggcttcagatgactctaacaacagctggaatccggcatacaattgctttgatcgtccgggtaaaaaatgtatctcttttacgctacacatcaacggcaaagatcacgatttgttagcggtggataaaattcatgtcgatttaaactggcgatatctgaacgagtatcttgatcaaatcagcgctaatgatgaagttctatttttgaaacaaggccatgagatcattgccaagaatcaactcgctcgtgaaaaactgattatttataatagcgaaggtaattataatattattgattctgtcgatactgaatatatcgaaaaaacatcagcggtgccaaacaacgcattattcgaaatctatttttattatcctggcggtaatttattgaacgcatcagataaacttttttatctgccgtttgcgttcattattatcgtattgctggtggtttatttaatgaccactcgtgtgttccgtcggcaattttctgaaatgacagagctggttaatacgctggcgtttttgcctgactcaacggatcaaatcgaggctctgaaaattcgtgaaggcgatgcgaaagagattatcagcatcaaaaattcgatcgcggaaatgaaagatgccgaaattgaacggtcaaataaattgctctcactgatctcttacgatcaggaaagtggttttattaaaaatatggcgattattgagtctaacaataatcagtatctggctgtggggatcatcaaactgtgtggtctggaagccgtggaagcggtgtttggtgttgatgagcgcaataaaatcgtcaggaaattgtgtcagcgaattgccgagaaatatgcgcaatgctgcgatatcgtgacattcaatgccgatctctatttacttctgtgtcgggaaaatgtacagacatttacccgtaaaatagcgatggtaaacgattttgacagcagctttggctaccgcaatctgcgcatccataagtctgccatttgtgaacctttgcagggggaaaacgcctggagttacgcagaaaaactgaaactggcgatttccagtatccgtgaccatatgttctcagagtttattttctgtgatgacgcgaaactcaacgaaatagaagagaatatctggattgcgcgtaatattcgccatgcaatggaaattggcgaactattcctcgtctatcaaccgatcgttgatattaacacccgcgccattctgggcgcggaggcgttgtgccgttgggtgtctgcggagcgggggatcatttcaccgctgaagttcattaccattgctgaagatatcgggtttatcaatgagctgggttatcagattattaaaacggcaatgggtgaattcagacattttagtcagcgtgcgtcgctgaaggatgatttcttactgcatattaatgtttcgccctggcagttaaacgaaccacactttcatgagcgttttaccaccatcatgaaagaaaatggcctgaaggcgaacagcctctgtgttgagatcactgaaaccgtgatcgagcgaattaatgaacatttttatctcaatattgaacaactgcgtaaacaaggggtacggatatcgattgatgactttggcaccggtttgtcaaacctgaaacgtttttatgaaattaatccagacagcataaaggtggactcgcaattcaccggcgatattttcggtactgcgggaaaaattgtgcgcattattttcgacctggcacgctataaccggatcccggtgattgcggaaggcgtagagagcgaagacgttgcgcgcgaattaatcaaattaggatgtgttcaggctcaggggtatctgtaccagaaacccatgccattctccgcctgggataaaagtggaaaattagtaaaagagtagtttacgtatgtccagaatcaataagttcgtacttacagtcagtctgctgatttttatcatgatttcagcagttgcctgcgggatctacactcaaatggtaaaggaacgggtgtatagcctgaaacagtccgttattgatactgcttttgcggtggcaaatattgctgaatatcggcgtagcgtggcaattgatcttatcaacacgctaaatcccacggaggaacagctgttggttggtttgcgcacagcttacgccgactcggtttccccctcttatttgtacgatgtcggtccttatctgatttccagtgacgaatgtattcaggtaaaggagttcgagaaaaattattgtgcagatattatgcaggttgtgaagtatcgacatgtcaaaaatacagggtttatctcttttgacggtaaaaccttcgtctattacctctatccggtaactcacaatcgtagtctgatatttttgcttggtctggagcgtttttctttactgtcaaaatcgctggcgatggacagcgagaacctgatgttctctctatttaagaacggtaaaccggtgaccggtgatgaatataatgctaaaaacgccatcttcaccgtttcggaagcgatggagcacttcgcctatttgccgaccggattgtatgtatttgcgtataaaaaagatgtttatttgcgggtttgtacattgattattttctttgccgcattggtggcagtgatatcgggtgccagttgcctctatctggtacgcagagtgattaatcgtggtattgtggagaaagaagccatcattaataaccattttgaacgcgtactggatggcgggcttttcttttcggctgccgatgtcaaaaaactctacagtatgtataactcggcgttcctggacgacctgaccaaagcaatgggcagaaaatcctttgacgaagatttaaaagcgctgccggaaaaaggcggttatttgtgcctgtttgacgtcgataaattcaaaaacattaacgacaccttcggtcatttgctgggcgatgaagtgttgatgaaagtggtgaaaatccttaaatcacagatcccggtagataaaggtaaagtctaccgcttcggcggtgacgaatttgcggtgatttatacgggtggaacgctggaagagttgctatcgattctaaaagaaatcgttcatttccaggtgggaagcattaatttaagtaccagtatcggtgtagcacattcaaatgaatgtcctaccgtcgaacgcttgaaaatgctggcggatgagcggctgtataagagtaagaaaaacggcagggcacagattagctggcagtaatcattattcgcaggccggacaaatgattttgcccggcctgaattaattaaacccggctaccccacaaatcgtactcatcggcgtgctcgactttcacacgcaggatatcacccggcttaacgttggtttcaccattgagataaaccgcgccgtcgatttccggtgcatctgccatgctgcgaccaatcgcgccttcttcgtccacttcgtcgataatcaccagaatttcacggcccactttctcttgcaggcgctcggcggaaatctgctgctgcagctgcatgaaacggttccagcgttcttctttaacttcttccggaacctggtcaggcagggcattggcgtctgcaccttcaaccgggctgtatttaaagcagccaacgcgatccagacgcgcttctttcaggaagtcgagtagcatctggaaatcttcttctgtctcgccagggaagccgacaataaaggttgagcgtagggtcagttccgggcagatttcgcgccactgtttgatgcgcgccagttggcgatctacagaacccggacgcttcatcagtttgagaatgcgcgggctggcgtgctgcaacggaatgtccagatacggcaggattttgccttctgccatcagtgggatgacgtcgtccacatgcggataagggtaaacgtagtgcagacgtgtccagatccccagtttcgataactgttcgcacaggctgaccatgctggtttttaccggctcgccgttgtggaagccagtacgatgtttaacatcaacgccataggcggaagtatcctgcgagatcaccagaatctctttaacgcccgcatctaccagacgtttcgcttcacttaacacttcgccaatcggacggctcaccaggtcgccgcgcatagacggaataatgcagaaggtgcagcggtgattacagccttcagaaattttcagataggcataatgacgcggcgtcagtttcacaccttgttctggcaccaggctcaggaatgggttgtgtttcggttttggcacgtagtgatgaacgtgctccagaacctgctcatagctatgaggcccggtgatttccagcactttcgggtggacttcgcggatctgatcttcttttgcccccagacaaccggtcacaataaccttgccgttttcattcaacgcttcaccaatggcttccagtgattcttgtaccgcgctgtcaataaagccgcaggtgttgacgatcaccatgtccgcatcgtcatagctcggtaccacgtcataaccttcagtgcggagttcggtgagaatacgctctgaatcaacaaggtttttcggacagccaagggaaacaaagccgattttcggctggggagttactttgctcatagcttaaaaaatattcagttacaggaaaggtcagggcagggattctacagagttctggataaaatttgtatcgcaatctcattcgctggcggaggcgaaggaaatgtaaattttgttaattcggcgtgaagaattgatcctggacagcattttgctcaaaaaatagccatactatttaattgcaacaaggctgggaagaggaggatcgaagtatgttcgttgacagacagcgaatcgatctgctgaaccggttgatcgacgcacgcgttgacctcgccgcatacgtgcaactgaggaaggcaaaaggatacatgtccgtcagcgaaagcaatcatctacgagataacttttttaaactgaatcgcgaactgcacgataaatcgctgcggttgaatcttcatctggatcaggaagagtggagtgctcttcatcatgctgaagaagcattagcgacagccgcagtatgtttgatgagtgggcaccatgattgcccgactgttattaccgtcaacgccgataagcttgaaaattgtctgatgagcttaacgctgagtatccagagcctgcagaagcacgccatgcttgagaaggcctgaaaactaagggggagaaagcgtctcccccttcatgtttaagtttttgtaaaaatgaatttgttatctcctccactgactacgctttaagccagagtcaatccggaggcgttatgcatcgacaatcctttttccttgtgccccttatttgtctttcttccgctctctgggcggctcctgcaacggtaaatgtcgaagtactgcaagacaaactcgaccatccctgggcactggcctttttacccgataatcacggtatgttaatcactctgcgcggcggcgagttgcgtcactggcaagcaggaaaaggattatctgcgccgctttccggagttccggacgtttgggcgcacgggcagggcggcctgctggacgtggttttagcgcctgattttgctcagtctcgccgcatctggttaagttattccgaagttggcgatgatggcaaagccggaactgctgtgggttatggccgcttaagtgatgatctctcaaaagtgaccgacttccgcaccgtctttcgccagatgccaaaactgtctaccggcaaccattttggcgggcggctggtattcgacggtaaaggttatctttttattgctctgggcgaaaacaatcagcgcccgacggcgcaggatctggataaattacagggcaaactggtgcgtctgaccgaccagggcgaaatcccggatgataatccttttataaaggaatccggtgcgcgcgccgagatctggtcttatggcattcgtaatccgcaaggaatggcgatgaatccgtggagtaatgcactgtggctgaatgaacatggcccgcgcggtggtgatgaaattaatatcccgcaaaaaggcaaaaactacggctggccgctggcaacctggggaatcaactattcaggctttaagataccggaagcgaaaggggagatcgtcgccgggaccgagcaacctgttttttactggaaagattcgcccgctgtgagcggcatggccttctataacagcgataaattcccccagtggcagcaaaaattatttattggcgcgctgaaagataaagatgtcattgtgatgagcgtcaacggcgacaaagtgacagaagatggccgtattttaacggacagagggcagcgaattcgtgatgttcgcactggacccgacggttatttatacgttctcaccgacgagtccagtggggaattacttaaagttagcccacgcaattagctaacgggaatcatcaccactttgcgcactgcggggcgttcagtgagttgctgataccagcgttgcagatttggacgcggtgtccaggtcaggccaacgttaaacaaattgtagatgaacggtgcgatagcgatatcgcccacaccaaactcgtcgccagagaaccattttacttttgccagttccgcatcgagcagggcaaacagggcgtcgcactctttgcaactggcatcaatggcggcctgatcgcgctcttccggtggtgttctgactaatcccatcaggatcccgcgatgagcattactgagcgtctggtttgcccagtccatccatttttccgcttccgcacgacgtgccggtgagtcgatccacaggcgtttttgcccgtactgtgccgccagatagcggacaatggcgtttgattcccaaagaatgagatcactttcgtcgtcacgcaacaacggcaccagcccgttagggttcatcgccagaaaatcagcatcgtgatttatcccaaactcacggcccgcgagaatttgctcataaggtagttccagttcttcgagcgtcagcaatactttttttacgttagttgaattattccgaccccacagcgtaatcatactcaccccttttccgacaggcagccacaggctgaacaggactccgatggtgaagtaaagttaacttttaagcaacagctggcaaaaaaatgacaccagaagcagcgaagcggcaggatattgcataaactttaaaaactttaccaacttacggtttctttaagtttgtgtgtgcgttattaatcaccaaacttatcatacggcgatataacgtattttttttgaatggatactcgggtggcatttatgacgcaatactcctctctccttcgtggtcttgcagcgggttctgcatttttattcctttttgccccaacggcattcgcggcggaacaaaccgttgaagcgccgagcgtggatgcgcgtgcatggattttaatggattacgccagcggtaaagtgctggcagaaggcaatgcggatgagaaactggatcccgcgagcctgactaaaatcatgaccagctatgtggttgggcaggcgcttaaggccgataagattaaactcaccgatatggtgacggtcggtaaagatgcctgggcgacgggaaatccggcactgcgtggttcatcggtaatgttcctcaaaccgggcgatcaggtttcggtggcagacttgaacaaaggtgtgattatccagtccggtaatgacgcctgtattgcgctggctgattacgttgccgggagccaggagtcatttattggtctgatgaatggttatgccaaaaaactgggtctgaccaacactaccttccagacggtgcacggcctggatgcgccggggcagttcagcaccgcgcgcgatatggcattgctgggtaaagcattgatccacgatgtgccggaagagtacgccattcataaagagaaagagttcaccttcaacaaaattcgtcagcctaaccgtaaccgtctgctgtggagcagcaatctgaatgttgatggcatgaagacaggaaccacggcaggcgcgggatataatctggttgcttcggctacccagggcgatatgcgtttaatctccgtagtgttgggggcgaaaaccgaccgtatccgttttaatgagtctgagaaattattgacctggggtttccgcttctttgaaaccgtgacgccaattaaacctgatgccacctttgtgactcagcgcgtctggtttggtgataagagcgaagtgaatctcggggcaggtgaagcgggctcagtgaccataccgcgtgggcagctgaaaaacctgaaagcgagttatacgttaacggaaccgcagcttaccgcaccgctgaaaaaaggtcaggttgtcgggaccattgatttccagcttaacggtaaatccattgagcagcgtccgctgatcgtgatggaaaatgtggaagagggcggattctttggtcgggtgtgggatttcgtgatgatgaaattccatcagtggttcggcagctggttctcttaatcttctgataaccggatggcgcgaaacgtcatccggttatacgtcattaatacatcaacttaatgcgctgcgtctgcgcgtacttcacatactcatcttccgggcaacaatcgctcaccacaatatcaaagcgtttcaggtcacccatgcgcgccggacgcaccttgccaaatttactgtggtcgacaaccagcacatgcttttgcgccatcgacatggcccagtgttttaccggcaactcttcaagattaaaacaggtagcgcctttactgacatgcacgcccgccgcagaataaaaagcgatatccgggcaaaaattattcagcgtttgctgaaaatcgatgggtttgaaaatggcgttgctggcgtgaaattcaccaccgcaaagaaacgcgcggcaatggggtttctctttcagcgccagaaaggtatttagcgaataacaaacggcggtaaaagggatttcattatcaatcgcttcaataatccacggcgtggtggtgccacagtcaaaaaagagggtctgatcgggttctaccagcgtcgcagccagttttgccgcccggcgtttttcttccaccaggcgggatttttgatcgcttaacaggtaatggctggcactgcgcggttccagaacaatatagccgccgagcaaaacgacgggcgcactgtggttgttcagatcgcgacgaatcgtcatctccgaaaccccaagcagggcggcggcgtctttaagatgtaacttatcgctgcgttttaattcttgcagcagctgcccgatacgctcttcgcgacgtgtttccataatccctctgaatagttattgaagcgagccgctcaatactacactttttagcagagatcagtcacgcacccagcctttgcggatcggtaatgcaaaacagacgcgataccacgattgcagacgttgatagagtttatgccccatcgcttgccagataatctgggcactaaggcagccaatcatacctgccagcaatccaccgagcatatccagcggccagtggacgccaagataaacgcgcgaccaggcaatgacgacggccagcaccattaaaagtgagccggaccacaggcgatgccagcataaaaatgccagtgcaaaggtgaaaatcaccgtaccgtgatcgcttgggaatgagtcatccgccgcatgatgcaggaagttatagccgatattttcgacaaagggtcggtcgtgcggaaaaagatgtcccatcgtccaggacacaaacaggctgaccgccagcgcgatagcgatttttatcaccagttgccgttgtgctgtaagcccccacaaccaaagtaccacggccagcaacggcaccacggtaatcaaatctttagcaataaaaatcgccaacgagatcatccacggagccgagtctggcgtcgcgttaataagagagaatagagagagattcaaattttccagcataacttcccgacgcaaagtgattaaaagggagccaatacaggcaagtcgttgagaataaagtgcaggttaaactgggtaaagcggcatcgtcttatttccctcaagcggcctgtttacggtgggtgattgtaacgggcataggttaaataaaacttaaagaaagcgtagctatactcgtaataatgtaagaatgtgcttaaccgtggtttcagctacaaaattcgctttctcgttagctgcgcttttattaaactctgcgcgattattattggcgaagaaattgcatgcaaaataaattagcttccggtgccaggcttggacgtcaggcgttacttttccctctctgtctggtgctttacgaattttcaacctatatcggcaacgatatgattcaacccaattaataataaatgttggccgtggtggaacaatatcaggcgggcattgattgggttcctacttcgatgaccgcgtatctggcgggcgggatgtttttacaatggctgctggggccgctgtcggatcgtattggtcgccgtccggtgatgctggcgggagtggtgtggtttatcgtcacctgtctggcaatattgctggcgcaaaacattgaacaattcaccctgttgcgcttcttgcagggcataagcctctgtttcattggcgctgtgggatacgccgcaattcaggaatccttcgaagaggcggtttgtatcaagatcaccgcgctgatggcgaacgtggcgctgattgctccgctacttggtccgctggtgggcgcggcgtggatccatgtgctgccctgggaggggatgtttgttttgtttgccgcattggcagcgatctcctttttcggtctgcaacgagccatgcctgaaaccgccacgcgtataggcgagaaactgtcactgaaagaactcggtcgtgactataagctggtgctgaagaacggccgctttgtggcgggggcgctggcgctgggattcgttagtctgccgttgctggcgtggatcgcccagtcgccgattatcatcattaccggcgagcagttgagcagctatgaatatggcttgctgcaagtgcctattttcggggcgttaattgcgggtaacttgctgttagcgcgtctgacctcgcgccgcaccgtacgttcgctgattattatgggcggctggccgattatgattggtctattggtcgctgctgcggcaacggttatctcatcgcacgcgtatttatggatgactgccgggttaagtatttatgctttcggtattggtctggcgaatgcgggactggtgcgattaaccctgtttgccagcgatatgagtaaaggtacggtttctgccgcgatgggaatgctgcaaatgctgatctttaccgttggtattgaaatcagcaaacatgcctggctgaacgggggcaacggactgtttaatctcttcaaccttgtcaacggaattttgtggctgtcgctgatggttatctttttaaaagataaacagatgggaaattctcacgaagggtaaaaaaatgcctgactgctttgtgcgatcaggcattctcgaattaatggtgatggtcgtcaatctggtgttcgataaccatcccttcacctacgctggcaagatggcgaacataaggatgcgggcggtaagccggagctggcgcaggagccacatagacggtttgcggcacagtcgcgacgctgaccgcttgtggaacgctgactgaatcaggaaccacaaccactttgtatccactcggcacatcgacggtgacactttgcgccatcgccacaccagtaaagcccattaaaagcgcgcccaacagtagacaatttttcataatcatttcgcctgaaataatgcagcgggttaatttccgcgaattatgcagccttcattcaggcattgtgttgccgggcgtgctgccggttttattggtcaaatggcgcttcgtgtttaagaactttatcgatcacatccagtacgccttcacggttattggagcctgcgcggtattttgccgctgcgacgaccgcgctaccggcattttccattgcaaaactaaagcctgcctgacgcagcatctcaatatcgttaccgccatcgccaaagaccaccacttcgctgtcgtctattccccataatttctgcagttggcgaaggccattggctttatgtacgccggggataatcagatcgatgctgccgttgccggtgtggaccgacaccataatatcgccgatggcctcatgtaatgctttttgtacttgtggaatcagttcatcggaaagattcaggccaaacttaaagaagatatcctctaagttgtcaaagttatcgacgtattccagacggtgataatacatttccgccaccgttttcatggcatcgtcatattttttgagtgtataggcactattttttccgcaggcaataatttccacttccgggcgcgtcagcaaatgttccacgacagtagcaaacgcatccttcgatagctcgccattaaaaacatctttgccttcgctcactacccagccgccgttttcagccacaaaggcaatttcattagcaatttcagggaagaaagagatcaactgataatattgattcccgctggcgactacaaagcgaattccttgtgctttcatttgctgatactgagccataaaccgctcacggttataggttttttgatcgcttaagaaagtaccatccatgtctaccgcaattaatttaatgctcatcaactattctccatcgccgtctgcgttttggtatcgggtttggcgacggctttcgcgacaatagccgcgagaataaccagcgccagtacaaccagcattgcactacgtaatccataatgttcgccgagatagcccagcagcggcggcccgacgaggaaagccagataaccggtcgttgctaccacactgacgcgggttggtgcatcggggccggtatcgctggcggcagaaatggtcagcgggaagcccagcgaggcacccagtccccagagtacaacagacaccccagcgacccaggcgctatcgacaaaaataatcagcccaatacccaacgcccccattagtgcactggcccgaaccacggcaacgcgactgtaacggtcgatgaaccaaccgccggtgaagcgtccaacggtcatccccagggtaaaaccggcataaatcagcgagccggaagtagggctaaaaccgtgaccgtcaaccattaataagggtaaccagtcgttggcagaaccttcggcaaaggccatcgccagcaccacaacacctatcagcagcaactggatatcgcgataaaaaggtacgcctttttcgccatgctgggtgccatcggcagcatttttgcccgtaccgtcagggattgcctgaatggcgatataaataggtgcgatacctaccagcgccgccaataaaatgtgcaccgttgccggaacgccaaaggccgtcagtgccatcccgacacctgcgcctgccagcgtgcccaggctataaaaaccgtgcatcatcggcaaaaccgtcttattcatttctcgctcaacggcagcaccttcaacgtttatcgccacttccgcagaaccaaaacttgccccaaagacgccgagaccaacggcaaagagcaggggcgatgtcagccagagtgccagacttaatatcatcatcccgatcaatgcgcaggacatcgtgaccaggatgacattacgtgtcccaaagcgtttcactaaccacgccgagcagagaataccgctcatcgaaccgatcgacagaccaaagagaacaccgcccatttcagcgatcgagacagagagaatatcgcggatagcaggcgtacgggttgcccaggacgccattaacaggcctggcaaaaagaagaacataaacagcgcccaggttcggcgtttcaatgcattacgtgaagaatttacggtcatagatcacgtcaaaataagaagagggaagacaacattagcaaggttgtgtacatttgtacacaattgcagagagaggaaatgacatgcgtcgcgctaacgatccgcaacggcgagaaaaaattatccaggccacgctggaggcggtgaaactttacggaatacatgctgttacgcaccgcaaaattgctacccttgccggggtaccgttgggatcgatgacctactatttttcaggaattgatgagttgttactggaggcgttcagcagttttactgagatcatgtcccggcaatatcaggcattttttagcgatgttagtgatgctccgggcgcatgccaggctatcaccgatatgatctacagctcacaggttgcaacgccggataacatggagctgatgtaccagctctacgcgctggctagccgaaaaccgctattaaaaacggtaatgcaaaactggatgcagcgcagtcagcaaacgctcgaacaatggtttgaacccggaaccgcccgcgcgcttgatgcgtttattgaggggatgacgctgcattttgtcaccgaccgtaagccgctatcgcgcgaggagattttgaggatggttgagagggttgcagggtagtagataagttttagataacaaaaaacccatcaaccttgaaccgaaatggcggggttgatgggctccacaaaatggggacatcaaagaaaagcagtggcactaattaagactgatgccctgcggaaaagttctgcggttgtgcaaaaaaatttcattttcagggcaacttcagttttatcctaatcctggccataccatgacgatgattgtccctgccagcgtcagcaggacgttggcgattgcataggtgcccgcatagcccagcgccgggatgttactgcgagctgtatcactgatgatctccattgccggcgcgcaggtacgtgcgcccatcattgcgccgaacaacagcgcgcggttcattcgcaatacataagcaccgaacaagaaacagataaccacgggcaccagactgacaatcaatccggcaatcaacatctgaccgccaatcgcgcccaggccgttattaataccgctaccggcgctcagaccaacgcctgccataaacaccatcaagccgaactctttcaccatgcttaatgcaccctgcggaatgtaaccgaaggtcgggtggttagcacgcataaagcccagcataattccggcgaataacaacccggcagcgttccccatgccgaaactgaatgtgctgaactggaaggtgatcatcccgatcatcagcccaataacaaagaaggcgcagaatgccagcaggtcagtgacctggctgtgaatcgagataaagccgatgcgatcggcgatggtttttacgcggcgggcatcgccgctgacttgtaaaacgtcacctttgttaagcacgacgttgtcatctatcggcatctcaatctggctacgaatgacgcggttaaggaagcaaccgtgatcggtcaacttcagttgtgcgagacgtttacctacagcgttatggtttttaacgaccacttcttcagtgacgatacgcatgtcgagaaggtcacgatcgaaaacttctttaccgttacggaagctgggatcgagtcgggcatgggcgtcgggatagcctaccaacgctatttcatcgcccatttgtagcacggcatcaccgtctggatttgccagaatcccgttacgtcgaatacgttcaatgtagcagccggtttgtcgataaatacccagttcacgcagatttttgccgtcggtccaggccaccagttccgggccgacgcgataggcgcggatcaccggtaaataaaccttacggttggcatcagtgtccaggccacgttcgcgggcgatttgctgggcgctggtctgtaagtcctgatgctgcaatttcggcaagtaacgcgcaccaacaatcaaactcaccagaccgattaaataggttaaggcatacccgaggctcagattatccagtgccagtgagagctgcctgctttccatgccggaatgacgcagtgtatcgccagcaccgaccagaaccggtgtcgacgtcatagagcctgctaacataccggccgtcaggccaatatcccagccaaacagcttacctaaccctaaggcgatcaccagcgcactgccaaccatcaccagtgctaacattaggtaatttttcccatcgcgaaaaaaaatggaaaaaaagttcggtccggcttcgaccccgacgcagaaaataaacagcataaagccaagattaagcgcatcggtgttaatgctgaaatgttgttggcctaataacagcgatacgactaaaacgccaatggaattacccagttggatcgaaccaagtcgtaactttccgagacatagcccaagcgcgaggaccacaaataataacagaatgtaattcccatttaacaattcggcgacgtttatattcacggaggctaacttcttgtttactagtaagctgttgaaagaaatggtaatttacgataatgttttttaccagaattcagggcgcagattcattcagcgcacctaaacgatagtaaagtaacaatatattttactagtgtaatcacattaggtatcaacggctatatgaattgcgttggcctatattagcatggaatgcgaagcggctttatcttactgaacgccacactggcgaaaaatgtgttcgatagacgcagtgtcaggaggaacgagtgaaacataaacaacgttgggcgggggcaatctgctgttttgtcctcttcattgtggtgtgcctttttctggcgacgcacatgaaaggcgcttttcgggctgccgggcatcctgaaatcggcttgctatttttcattcttcctggagcagtcgccagcttcttttcacagcgtagagaagtcctgaaacctctgtttggcgcaatgctggcggcaccctgttcgatgctcattatgcggctgtttttttcaccgacgcgctcattctggcaagagctggcatggttactaagcgcggtgttctggtgtgcgctgggggcactgtgtttcttatttatcagtagtttgtttaaaccacagcacagaaaaaatcagtaaagccctcaacgcgagggcttgtcagacgatcaggcgtccagattttctttcacccatgcagcaaaatcggtatagccgccgatatgttgctgatcgacaaaaatctgcggcacggtttctacgggtttacctgccttttgttgtagatcttctttagtgatcccttccgcacgaatatctacatactgatactgaaaatcatcgcgttcattgctcaatttctcagccagatcttttgcacgcacacagtaagggcaacccgaacgaccaaaaataacggtttgcattatttctctcctcatagatttatgcctgtaatgatcacgctaaaatgtattcgctgaaagtaggtttaacctgttgcattaattgctaaaagctataactgttaaacacaatacagtgaaaagttttagactgaaggctcactttgcagagggaagcgtatgcgcgcgatcggtaaattgcctaaaggcgtgttgatactggaatttatcggaatgatgctactggcggtggcgctgctgtcggtaagcgactccctgtcgctgcctgagccattttctcggccagaagtgcagattctgatgatttttctcggtgttttgctcatgcttcccgctgcggtggtggttattcttcaggtggcaaaacgtcttgccccacagctgatgaaccgtccaccgcaatattcacgttcagaaagagaaaaagataatgacgccaaccattgaacttatttgtggccatcgctccattcgccatttcactgatgaacccatttccgaagcgcagcgtgaggcgattattaacagcgcccgtgcgacgtccagttccagttttttgcagtgcagtagcattattcgcattaccgacaaagcgttacgtgaagaactggtgacgctgaccggcgggcaaaaacacgtagcgcaagcggcggagttctgggtgttctgtgccgactttaaccgccatttacagatctgtccggatgctcagctcggcctggcggaacaactgttgctcggtgtcgttgatacggcaatgatggcgcagaatgcattaatcgcagcggaatcgctgggattgggcggggtatatatcggcggcctgcgcaataatattgaagcggtgacgaaactgcttaaattaccgcagcatgttctgccgctgtttgggctgtgccttggctggcctgcggataatccggatcttaagccgcgtttaccggcctccattttggtgcatgaaaacagctatcaaccgctggataaaggcgcactggcgcagtatgacgagcaactggcggaatattacctcacccgtggcagcaataatcgccgggatacctggagcgatcatatccgccgaacaatcattaaagaaagccgcccatttattctggattatttgcacaaacagggttgggcgacgcgctaaaaccgccacgtcgatgtatgatacgcgggcttttgaccaggtctgacagagaggtgcagggtgaaaattgccatattgtcccgggatggaacgctctattcgtgtaagcggctgcgtgaagccgctatacagcgcggtcacctggttgaaattcttgatccgctttcttgctacatgaacataaatcctgcggcgtcttctattcactacaaaggccgcaagttaccccattttgacgcagtgatcccgcgtattggcaccgccattaccttttatgggacggcggcactgcgccagttcgagatgctggggagctatccgctcaatgagtcggtcgccattgcccgggcgcgtgacaaattgcgttccatgcaactgctggcgcgtcagggcatcgacctgcctgtcacgggcattgcgcattcgccggatgataccagcgatttaatcgacatggtcggtggtgcgccgctggtggtcaagttggttgaaggcacgcagggaattggcgtcgtgctggcggagacgcgtcaggcggcggaaagcgtgattgacgctttccgcggtctgaacgcgcatattctggtgcaggaatatatcaaagaggcgcaagggtgcgatatccgctgtctggttgttggcgatgaagtggtcgctgcgattgaacggcgggcgaaagagggcgattttcgttccaatttgcatcgtggcggcgcggcaagcgtcgccagtatcacaccacaggagcgtgaaatcgcgataaaagccgcgcgaacgatggcgctggacgttgctggtgtggatattctgcgtgctaatcgcgggccgttggtgatggaggtgaatgcgtcgccggggctggaaggaatagaaaaaaccaccggtatcgacatcgcgggtaaaatgatccgctggatcgaacgccacgctacgacagaatattgcctgaaaacgggtggttagtcgcaatcacattactgatcatggttttgcctgcgctttttgcgtaagctgtgccggtctttttatcgaaagaggttgtacaaaattatgacatcgctggtcgttcctggtctggatacgctgcgtcaatggctcgatgacctggggatgagtttttttgaatgtgataactgtcaggctctgcatctgccccatatgcagaatttcgacggtgtctttgatgccaaaatcgatctgatcgataacacgatcctgttttctgccatggcggaagtccgaccttcagccgtattgccgctggcggcggatttatctgccatcaatgccagttcgctgaccgtgaaagcatttcttgatatgcaggatgataatctgccaaagctggtggtttgccagtctttatccgttatgcagggcgtaacctatgagcagtttgcatggttcgtgcgtcagagcgaagagcagatttcgatggtcattcttgaagctaatgcccatcaactgctgttaccgactgatgatgaagggcaaaacaacgttaccgaaaactatttcctccactgataactcctttcgagcacgcagtcgctggtgcagtggctgcgcgctgcaaaattatctgctgtttttaaccttttcttaaagattatttcacttctcttgtgtcgatttggctttatcacatagagcaaatatgcataaaaatttgttaaataccgttttttaatccgagctatagtctcaaaccctggctaaagttattcttgcgatgcttttatatagcgagcagtgctggccgggagaaagttctcttttcttacaccgcgccgataaaaaatatgcacgtttattgcatatctttcagtgtgacaacttttgttcgtttgttaacgaactttcagaaggaaagagatatgaccgccttaaataaaaaatggctatcgggtctggttgcgggtgctctgatggccgtctctgtcggcacgctcgcggctgaacaaaaaacactccacatttataactggtctgattatatcgccccggacacggtggccaattttgaaaaagaaaccggtattaaagtcgtctacgatgttttcgactctaacgaagtactggaaggcaaattaatggccgggagtaccggctttgatctggtggttccatctgccagctttctggagcgccagttgactgcgggagttttccagccgctggacaaaagcaaattgccggagtggaagaatctcgacccggaactgctgaagctggtcgccaaacacgatcccgacaataaatttgctatgccctatatgtgggcgacgaccgggattggctataacgttgataaagttaaagcggtgctgggcgaaaacgcgcccgtcgatagctgggacttgatcctcaaacctgaaaatctggaaaaactgaaaagctgcggtgtctctttcctggatgcgccagaagaagtttttgctaccgtgttgaattatctcggcaaagatcccaacagcactaaagcggatgattacaccggaccggcaacagatctgctgttaaagctgcgcccgaacattcgttatttccattcatctcaatacattaacgacctggcaaacggcgatatttgcgtcgctatcggctgggcaggtgatgtctggcaggcgtcaaaccgcgcgaaggaagcgaagaatggcgtgaatgtctcgttctcgattccaaaagaaggggcgatggcgttctttgatgtattcgccatgcctgcggatgccaaaaacaaagacgaagcctatcagttcctgaattacctgctgcgcccggatgtagtagcgcatatttccgaccatgtgttctatgccaacgccaataaagcagccacgccgctggtgagtgcggaagtccgtgagaacccaggtatttatccgcctgcggatgttcgtgcgaagctgttcactctgaaagtgcaggatccgaaaatcgaccgtgtgcgcacccgcgcgtggaccaaagtgaagagcggaaaataatccgcagtcgtagatgccggaggggcgcaccacacccgccggcaattcgcaccattatggtgcgcttgcacacattcaatgccggagagcagccgtgaatgacgctatccctcgcccgcaggcgaaaacccgtaaggcgctgacgccgctattagaaatccgcaacctgaccaaatcctacgatggtcaacatgcggtggatgatgtcagcctgaccatctacaaaggtgaaatcttcgcgctgctgggcgcatccggctgtggcaagtccacgctgctgcgtatgctggcaggtttcgaacaaccttctgccggacagataatgcttgatggcgtcgatttgtcacaggttccgccttacctgcgccccatcaatatgatgtttcagtcttacgcgctgtttccgcatatgaccgtggaacagaacatcgcttttggcctgaaacaggacaaactaccgaaagcggaaattgccagccgggtcaatgagatgctcggcctggtgcatatgcaggagttcgccaaacgcaaaccgcatcagctttccggtggtcagcgacaacgtgtggccctggcccgaagccttgcgaagcgcccgaaactattactgctcgatgagccgatgggcgcgctggataaaaagctgcgtgacaggatgcagcttgaagtggtggatattctggagcgcgtcggtgtgacttgtgtgatggtcacccacgatcaggaagaggcgatgaccatggcggggcgcatcgccattatgaatcgtgggaaatttgtccagattggcgaaccggaagagatctacgagcatccgactacccgctatagcgccgaatttattggctcggtaaacgtctttgaaggcgtactcaaagagcgtcaggaagatggcctggtgcttgattcgccggggctggtgcatccactgaaagtcgacgcggatgcctcggtggtcgataacgtgccggtacatgtggcgctgcgcccggaaaaaatcatgctttgcgaagagccgcccgccaatggttgtaacttcgcggtgggggaggtgatacacattgcctatctcggcgatctttcggtgtatcacgttcgtctgaaaagtgggcagatgattagcgcccagctacaaaacgcccatcgtcatcgtaaagggttaccgacctggggcgacgaagtgcgtttgtgctgggaagtggacagctgtgtggtgctgacggtttaaggagcaaagatgagtacacttgaacctgctgcccagtcgaaaccgccgggcggatttaagctgtggttgtcgcagctgcaaatgaagcatgggcgcaaactggtcattgcgttgccatatatctggttgatcttgctgtttctgctgccatttctgattgtctttaaaataagcctggcggagatggcgcgcgctattccaccttataccgaactgatggagtgggctgacgggcaactgtccatcactcttaatctcggtaattttctgcaactgaccgacgatccgctctatttcgatgcttatctccagtcgctacaggtggctgcgatttcgacattttgctgtttactgatcggctatccgctggcgtgggcggtggcgcacagtaagccttcgacccgtaatattttattactactggtgatcctgccgtcgtggacctcgtttctgatccgcgtttatgcctggatgggaatattaaaaaacaacggtgtgctgaataattttctgctgtggctgggggttatcgatcaaccgctgaccattctgcataccaatctggccgtttatatcggcattgtttacgcttacgtgccgtttatggtactgccgatttataccgcgttgattcgtattgattattcgctggtggaagcagcgctggatctcggtgcacgaccgctgaaaacgttctttactgtgatcgtgccgctgactaaaggtgggattattgccggatcgatgctggtgtttatcccggctgtgggcgagtttgtgatcccggaactgctcggtggcccggacagcatcatgatcgggcgcgtgctatggcaagagtttttcaataaccgcgactggccggtggcctcggcggtagcgatcatcatgttgctgctgctaattgtgccgataatgtggttccacaaacaccagcaaaaaagcgtgggagaacacggatgaataatttaccggtagttcgttcgccctggcggattgtgattttgctgctgggctttacctttctctacgcgccaatgctgatgctggttatctattcgtttaacagctcgaagctggtgacggtgtgggccggctggtcaacgcgctggtatggtgagttattgcgcgatgacgcgatgatgagtgcggttggtttaagtctgacaattgcggcctgtgcggcgacggcggcggcgatcctcggaactattgcggcggtggtgctggtgcgctttggcaggtttcgcggatcaaatggctttgcctttatgatcaccgcgccgctggtaatgccagatgtcatcacgggcttgtcgctgttgttattattcgtcgcgcttgctcatgccattggctggcctgcggaccgcggtatgctcaccatctggctggcgcatgtcactttttgtacggcttatgtggcggtcgttatttcttcaagattgcgggaactggatcgctcgatagaagaagcagcgatggatctcggtgcgacgccgctgaaagtgtttttcgtcattacgctaccgatgatcatgcccgcgatcatttctggctggttactggcttttactttgtcgcttgatgatctggtgatcgccagctttgtttccgggccgggagccaccacgttaccgatgctggtcttttccagcgtgcggatgggggtgaatccggaaatcaacgccctggcaacattgatcctcggcgcggtcggaattgtcggatttatcgcctggtatctgatggctcgcgcagaaaaacagcggatacgcgacatccagcgtgcaagacgtggctgaagacactaaaatttgccaacctggctacataatgccgcgcatgtcgcggcattgttttcatggaagacgaaacgttgggattttttaagaaaacatcttcatctcatgctcgcctgaatgtgcctgcgctggtgcaggtggcggcgctcgccattattatgatccgtggcctcgacgtgctgatgattttcaatacgctgggcgtgcgcggtattggcgagttcattcatcgcagcgtacaaacctggagtttaacgctggtctttttaagcagtctggtgctggttttcattgagatctggtgtgcgttttcactggtgaaagggcgtcgctgggcgcgctggctatatctgctgacacaaatcaccgccgcaagttacttgtgggcggcttcgctggggtacggttatccggagctgttcagcattcccggtgaatcaaaacgtgaaatcttccatagcctgatgctgcagaagctgccggatatgctcatcctgatgctgctgttcgttccctcgaccagtcggcggttcttccagttgcaataatgtgtataatcgtcgcccctgatgatgtgaaggtcaatgtatgcagtgcgcactttacgacgcgggtcgctgtcgttcctgtcagtggataatgcagccgattccagagcaactctccgctaaaaccgccgatcttaaaaatctgctcgccgactttccggttgaggaatggtgcgcgccggtgtcaggcccggaacaagggtttcgtaataaagccaaaatggtggtgagtggtagcgttgaaaaaccactgctcggtatgctgcatcgcgatggcacaccagaagacctttgtgactgcccgctttatcctgcctcatttgcgcccgtttttgcggcgctaaaaccgtttatcgcccgagcggggttaacgccctacaacgtggcgcgtaagcgtggcgaactgaaatacattctgctgactgaaagccagagtgatggaggcatgatgctgcgctttgtactgcgttctgataccaagctggcgcaactgcgtaaggcgctgccgtggttacacgaacaactaccgcagctgaaagttattaccgtcaatattcagccggtacatatggcgattatggaaggggagacggagatctacctgaccgaacaacaggcactggcggagcgttttaatgacgtaccgctgtggatccgtccgcaaagtttcttccagactaatccggcggtcgccagccagttgtacgccaccgcgcgcgactgggtacgacagctgccggttaaacatatgtgggatctgttctgcggtgtggggggctttggtttacactgcgcgacgcctgacatgcagttaaccgggatcgaaattgcatcagaggccattgcctgtgcaaagcagtcagccgctgaactgggcttaacgcgtttgcaatttcaggcgctggactccactcagtttgccaccgctcagggggatgtgccggagctggtgctggttaacccgccgcgccgcggcattggtaaaccgctgtgtgattatctctcaacgatggcaccgcgttttatcatctactccagctgtaacgcccaaactatggcgaaagatatccgcgaactgcctgggtttcgtattgaacgggtgcagcttttcgatatgttcccgcataccgcgcactatgaagtgctgacgctgctggtgaagcaataaaaaagccgcatgtgcggcttcagattgctgacaaagtgcgcgttgtttatgccggatgcggcgtaaacgccttatccggcctacaaaagcgtgcaaattcaatacattgcatgggccatgtaggcctgataagcgtagcgcatcaggcaattttacctttgtcatcagtctcaagccgcggttgcggctttctgaatcttactgtgggaaccactggtcactgattttttgataagtaccgtcagctttaattgctgccagcgcgttattcagtttttccagcagggctttgttatccggacgtacagcgatgcccaggccggtgccaaaatattgcggatcggtcactttctcagtagcaacaccaagttgtggattggttttcagccattcgtttaccaccgctgtgtcaccaaataccccatcaatacgaccatttttcagatcgataaaggcattctgataactgtcataagagacagttttcacttccgggtgctgatcctgaatatatttctggtgcgtagtaccgttttccatcccaatacgtttgcctttcagatcggcaaacgttttgtaggtatcttttttggcaatcacgacggctgagttttcatagtagggcgtggtaaacgatacctgtttgctacgctccggggtgatatccataccggagattacggcgtcatattttctgaatttcagggacgggatcaggctgtcgaacgcgtgattagtaaaagtacattctgcctgcatttgtttgcacaaggcttttgccagatcgatatcaaagccgacaatctcattattagcacctatagattcaaagggtggataggtggctgaaacgccaaaattgattttctctgcggcagaagcaccgaaagtaaaggaagcaagtaaagcggcaagaactaactttttcatgatggaactcccgtctgtcaatcttatgatttttggccgtgtctgcggcatgggataacaatgccatcaagtgaatttatatgcaataaacatgattaaataatttaaatgaaataaaaaagacggacaacttagtgggttgtccgtcttcattataagaatttatgcactatgtaggccggataaggcgtccccgccgcatccggcacaggcaccgtgctgatgtctgatgcgacgctggcgcgtcttatcagacctacaaaaccccccggcgaatgtacgcagccacattaatttcgccgttcgaatgccagcgctttgcgctcgatcagacgcatcatcagcgtcagcaggccgttaacgaccaggtaaataatccctgccgcaccgaacaccattacatcgtaggtgcgtccgtacaacaactggctgtatcccatcacttccatcagcgtaatggtgtatgccagagaggtacttttgaataccagcaccacttcgttggaataagaagagagcgagcgtttaaaggcatacggcagcaggatcgccagcgtatcttttttgctcattcccagggcgctacaggactgccactgaccttccgggatcgcacgaattgcaccgtaaaacagctgcgtggtatacgccgcactattcagcgacaacgcaatcagcgcacataaccacggttctgacaacaaatgccacagtgccggatactcctgcaaagtcggaaactggcccggcccgtaataaatcaggaagatctgcaccagcagcggcgtaccggtaaacagcgtgatataaccccgcaccagccacaccagcaccggcgttttcagcgtcaggatgatggtaaaaatcaatgccagaatcagtgccacaatcagcgaggcaacggttagcgtcaggctggtgtgtagccctttcatcagttcgggtaaatactcaaacattagctgggcctccgctcaaaacgtgtcgcgcgcaggtcaatgcgtttgagaatgtactgactgagcagggtgatcaccaggtaaatcgccgccgccacaatgtaccaggtaaatggttcctgggtacgagtagcgatgctttttgtttgcagcattaaatcattcacactaatcaaactgaccagcgcggtatctttcagcagcaccagccactggttaccgaggccaggcagcgcatgacgccacatctgcggcatcaccagacggaaaaagatagccgatttcgacagccccagcgcctgaccagactcccactgacccaccggcaccgctttcaacgcgccccgaagcgtttgcgaggcataggcggcatacagcagtgacagagcgatgacaccacaaaggaacgggctaacgtcgaagttctcaatgtccatctgcactgggatctgcacgaacccaagattgatagtgaagccatccgaaagcgtcagcagcagctgcgaggagccaaaatagataaacagcaccaccagaatttctggcaggccacgcagaatggttaccagcgctgaacctgcccacgcgacaggacgccattttgccgactcccataccgcaaagaacatcgccagcgccagcccgacaatcaatgcacaaacggcaaggccgacggtcatcccggcggcgcttgctaaaggaaaaaattcattcatcaggaattacttctggaaccatttgttgtagatggtttcgtaagtgccatctttcttcactttttccagcgcagtgttgagtttctgctgcagctcagtgttgccctgacgtaccgcgatgccgaggccagtgccgaagtaatctttatcggtcactttgtcgcccaccgccgccagtttcgggttatctttcagccactcagtgaccactgcggtgtcaccgaagacgccgtcgatacgcccgttttgcagatccagttttgcgttctggtagctgtcatacggaacggtagtgatttccgggtgcttatccataatgaatttctggtgtgtcgtcccgttctgtacgccgacttttttgcctttcagctgatcaacactggtgtatttgccttgctgacccacaaacagggcagagttgtcatagtacggggtggtaaacagcacctgcttttcacgctccggagtgatatccatgcccgccatcacggcttctacgcgacggaatttcaggcttgggatcaggctgtcaaacgcctggttagagaaagtgcaggttgcatcaatctctttacacagcgcttgtgccaggtcgacgtcaaaaccaacgatctggttgtttgcatcaatcgattcaaacggaggataggaggcttcggtagcaaaacgaatggtttcggcagctgtggcggaaagactaaaacctgcaattaacgcggcaatcagaacttttttcattgttgttatcccgaatcttagtgagagagatagtttttaaatgcttcggtttgcggctcggtaaagcagctcgcgtcgccttgttctacgatatgaccattttccatatacaccactcggctggcggttttacgcgccacttcaacttcgtgggtgacgatcacctgggtaatattcgtttctgccagctcacgaatgatgctgacgatttgtgccgtaatttccgggtccagtgcggcggtcggttcatcgaacagcagtacctgcggttccatcatcaacgcacgggcaatagcaacacgctgctgctgaccaccagaaagatgcagcgggtaacgatcgctataaggtttgagacgcagacgttccagcagtttttctgcacgggccagcgcctgatctttactcaaccccagtacacggcagggcgcttcaatcaggttttgctgcacggtcagatgcggccacaggttgtattgctgaaacaccatgccaacgttacgacgcaaatcgcgaatcgctttgtcagagggtgttttggtgaaatcgaaatggttgcctgcaatgttgagcgtaccggagcgcggcatctcaagcagattgagtacacgcagcagcgagcttttacccgcgccgctggggccaagtaacaccagcgtttcgccctgtgggcaatccagcgtgatatcgaacagcgcctgatgcgcgccgtagaagcaattaatgccgtttaattgaatactcattgacactcgtatactggcagtctgatagctattgaggtcgaagatagtacctttgacagaataattatgcaatatttctgctttaaaagttaaaagcaaagcgcattattcaataaacatagcacaaaataacgggggcggtggtcggcgagcataaatgtcggcattcctcacgaaatgccggacaatttacggggtttattggttgatcaaggcgttagcgattctcgatggactgacggagcgtacccgccgtggcatgaacgctaccgcctaagtaacgcacatcgtcgatgacccaacactggccttcctgaatcattaacacttcatcctgccaaccctggtcaccctgtttgagatccacgcgcaatggaatgttacgggcatcacgattagggatagtcgatgcactggcaacgtgggcgctatctggcaaggtggttcgactggagaatggatcgttggtcagtagttcccgatggttattatcccgggaggcatcgctaagcagtgtcgccagtttgtcgctcagataagggcgcaaggcggtgatgtcgttgctgcggtgcaaaatgcggtagtcataaaattgctgggccacgttatccgggcctccttcaacgcaaggaccactgcgtgtgccgttatctttataagctggagtgactgtggtgcaggcactgaggagcagtgcgcaggggataagcattgtcaatttgctgtagcgcataatgatttccttataagcgatcgctctgaaagcgttctacgataataatgatatcctttcaataatagcgtatcagtctgataatgcttttgagatcgaaggcttagcaaacaaggagatcgatcatgcaattttctacaaccccaactctggaaggccagaccatcgttgaatattgcggtgtggtgaccggcgaagcgattttaggtgccaatattttccgtgatttctttgccggtatccgcgatatcgttggcggacgttccggtgcgtatgaaaaagaactgcgtaaagcacgggagatcgcctttgaggaattaggctcccaggcgcgggcgctgggggccgatgccgtcgtcggtattgatatcgactacgaaacggtcgggcaaaacggcagtatgctgatggttagcgtcagcggtacggcggtgaaaacgcgtcgatgagaagattcttctggctggtcgctgccgctctgttattggcagggtgtgcaggcgaaaaaggcattgtcgagaaagagggatatcagcttgatacccgacgccaggcgcaggcggcgtatccgcgcattaaagtgctggtgatccactacaccgcagatgattttgatagctcgctggcgacactgaccgataagcaggtcagctcgcattatctggtccctgcggtaccaccgcgatacaacggtaaaccgcgcatctggcaactggtgccggaacaagaactggcctggcatgcggggattagcgcctggcgcggggcaacgcgccttaacgacacctctattggcattgagctggaaaaccgtggctggcaaaaatcggccggagtgaaatattttgccccgtttgaaccggcacagattcaggcgcttattccactggcgaaagatattattgcccgttatcacatcaagccggaaaacgtagtggcacatgcggatatcgcaccgcagcgcaaagacgatccggggccattatttccctggcagcaactggcgcagcaggggattggtgcctggccggatgcgcagcgggttaacttttaccttgccgggcgcgcgccgcacacaccggtagataccgcgtcattgctggagcttttggcgcgctacggttatgacgttaaacctgatatgacaccgcgcgagcagcggcgcgtgattatggcattccagatgcatttccgcccgacgttatataacggcgaagcggatgcagaaactcaggcgattgccgaagcattgctggagaaatacgggcaggattagcgcggcagttttccgtggtcgcgtagccaggcggcagttttctcgataccttcatccagggtgatgaccggctgataacctaactcttcctgcgcacgcgtaatatccagcgtaaagtcaaaattcaacttggagacgccgtagtgggtcagcggcggctcttttgctgacttgcggcctaaacgctccatgctgcgggcgatcatatccagcatcgggtaggggacggaacgaatacgacagtcaatattcaactcgtcgatcagcttctgcacgatgctgcgcagtgtgcgatgctcgccgttggtgatgttgtacacacgcccggaaggtagcttatcgcaggcttcctggcttgccagccacattgcgtgcacggcattttcatagtaggtcatatcgaccagcgcactgccgccatgcggtaacagaatactgccgtagtggtgcatcatatgcgccagacggggaataaagactttatcgtgcggtccgaacagactttgtgggcgcagaatagtaaagcgcgtttgtggattcgcctgcgaaagcatattgatcacttcttcgctggctgctttgctgcgggcaaactcgttggcgaagcggtgagggcgaaaatcttctttaatatcgcgatggtggtgataatcgaagtacagggagggggaagagatatgaataaagttacgcacaccccaggcgacagcccattcacccaggcggcgagtggcgcgaacgttagccagatcgaaagcctgttgtgtcccccagggtgaggtaaagctggagcagtgccacagcgtatcaatgcccgcgagcatcactttagcttgtgatgaaaccagctcggtcagatccgccggaacaaactctgcgcccattttttccagcaatttgcccattgcctcgttgcgaccggtcgctcgcacgctgatgcctttctggcataaaaactctaccgcgtttcgacctaagccgctggtggcgccggtaaccagtaccttcatatcaatccactgttgttgagaaaataacgtgcgcattcttccgtgatttcccccatgatgcaatgggaaacatgaaagaataacgcaggttttgtcgattaatctgtgctttgttctgccagtctggcgatttgttttgccattccgcgaaaaataaacagatgcgcggggatcatcaataaccagtaaaacagccccggcataccgtgcggatgccagaaagcgcggacatcgatagtacgatagtcgcctttatcttccaggctaaaacacagtcgtcccagccccggcgctttcatgccaaataacaacgtaagttgtttttccggttcaacgacaatcactttccagctatccaccgcatcgccagtctgtaaatattcgcgctccgggcggcctttcgccagcttatgaccgatcgcgcggtccatcaacgcccgtgtctgccacaaaatattgccaaagaaataacgctctttaccgccgatttggttcactacctgccataaagcagcaaggctggcggacgttttaacggtaaaccccgcctgtttggcaaaataaccgtactccggtcgccagcgggcaaaggcctgagcgtcgtagccccagtcgctggagttgaccagtttttcctcctctttcaacgtgctacgtaccgcgtcatcgaaagcgatcagccgttgtgggatgagtgcacgtagcgcggtatcatccgccagcagatcgtgtttcagcccctgaatcaacgccctggcggtggtgggcggtacggaagtaatcacattgagaaaccacaccgaaatccagcgggtggggagggggatggggatcaaccagcggcgcttaccgctcaccgccataaaatgttcaaactgttgctgataactgagcacctctggtccggcggcttcgaagatgcggtgttcgctggccggatgatctaacaacgcaaccagatagtgcagcaagttttccagcgcaatgggcgtggtgcgtgaacgaacccagcgcggaggcgttaagactggcaggttgtagaccatatcgcgcatgacttcgaacgccgcggaacctgcgccaacgataattccggcccgcagttcggtcacgggtacattcgcttcacgcagaatgtccgccgtagcctgacgagcacgcagatgatccgactgctcatgtggcggggcctgcaacgaactaagaaagattaattgcttaactggtacttcacgtagcgcatcgcggacgttgagagccacctggcgctcctgagcgataaaatcgccgccttcgcccatgctgtgcaccagaaaatagaccgtatcgatatcctgcaacagggccggtaggttatccggccagctgagatcgactttatggcaactgacgtttgccagttgcagctttgcaagcctgtcgacatgacgtgccgccgccaggatctgatgcccttgctggctgagtgtgcgcaccagatgctgaccaatgtagccactggcaccgagaactaaaatgcgttgcggcacgtctctctccttaacgcgccaggaatgcacgccagtgggcggcgacttccgccagttgttcgcgcgagacgtcaagatgcgtcaccaggcggacaatcggcgaggcgttaatcagcacgtttctcgctttcatgtattcgcctaacgcggcagcattttcttccccgacgcgaacaaacagcatattggtgtcctgacgcatcacatccgcgcctgcttcacgcagctgctccgccatccaggcagcgttgtcgtggtcttcctgcaagcgcgcaacgttatttttcagggcatatatcccggcggcagccagaatgccggactggcgcatcccgccacctgtcattttccgccagcgaatggcacgtttaatgtaatcacgattaccgacgagtaatgaaccgactggcgtcccaagacctttcgacaggcaaatggtgaacgaatcacaatattgcgtgatctctttcagttcgcagccgtaagccaccacggcattaaagatgcgcgcaccgtcaacatgcagcgccagattgcgctcgcgggtaaattcccatgcttctttcaggtattcccgcggcaacactttgccgttgtgggtgttttccagactgagtaatttggtgcgggcgaaatggatatcgtcgggtttgattttcatcgccactttatccagcggtagcgtgccgtcggcagccgcgtctatgggttgcggttgaatactgcccagcaccgccgcgccaccggcttcaaacagatagttatgcgcggcctgaccgacaatatactcttcgccgcgttcgcagtgactgagcagagcgaccaggttggcctgagtgccggtaggcagaaaaatggcggcttctttaccggaaagctctgctgcgtagtcctgcagagcattaacggtagggtcgtctccgtaaacgtcgtccccaaccggggcggccatcatcgcttcgagcatggcgcggcttggtcgggtaacggtatcactgcgtaaatcaatcatggcatgtccttattatgacgggaaatgccaccctttttaccttagccagtttgttttcgccagttcgatcacttcatcaccgcgtccgctgatgattgcgcgcagcatatacaggctgaaacctttggcctgttcgagtttgatctgcggtggaatggctaactcttctttggcgaccaccacatccaccaacaccggaccgtcgatggagaaggcgcgttgcagggcttcatcaacttcagacgctttttctacacggatacccgtaatgccgcacgcttcggcaatgcgggcaaagtttgtgtcgtgtagttcggtgccgtcagtcaaatagccaccagctttcatctccatcgccacaaagcccagcacgctgttgttaaagacgacaattttcactggcagtttcatctgcactactgagaggaaatcgcccatcaacatgctaaaaccgccatcgccgcacatggcgaccacctgacgttctggctctgtcgcctgcgcacccagcgcctgcggcatggcgttagccatcgaaccgtggttaaacgaacctaacaggcgacgcttgccgttcatttttagataacgtgccgcccacaccgttggcgtaccaacgtcacaggtgaaaatagcgtcatcggcggcaaaatgactaatttgctgcgccagatattgcgggtgaatggctttctcgctcggtttagctaaatcgtccagccctttgcgggcgtcgcggtaatcttccagcgctttatccagaaacttgcgatcggctttttcttccaccaatggaagcaatgcacgcagagtcgacttgatatcgccgaccagtgccatatccaccttgctgtgagcgccgatgctggctgggttgatatcaatctgaatgattttggcatcggtcgggtagaaggcgcggtagggaaattgcgtgccgagtagcactaacgtgtcggcgttcatcatggtatggaaacctgacgagaagccgattaacccggtcattccaacatcatacggattatcgtattcgacatgttctttaccgcgcagggcatgaacaataggcgctttaattttcccggcaaactcaactaactctttatgcgcccccgcgcagccgctgccacacatcagggcgatattgctggaataacgcagcagttgcgccagtttgcgtaactcttcttcttccggcgtcacgactggttgtggcgcatgataccagtgcatggttgccccttctggcgcaggttttaacgccacgtcgcctggtaacacgacaaccgaaacgccacggttaagcaccgctttgcgcatggcaatcgccagtacttgtgggatctgctccgggctggaaaccagctcgcaatagtgactacattcgcggaatagctcttgtgggtgggtttcctggaaatagccgctgccaatttcgctggagggaatatgagcggcaatcgccagtaccggaacgtgattgcggtggcaatcgaacaggccgttgattaagtgcaggttgccggggccgcacgatccggcgcagaccgccagttctccgctaagttgtgcttcagcgccagcggcaaaggccgccacttcttcgtggcgggtggacatccactcgatggtgcccatgcgattaagactgtcactaagaccgttcagagagtcgcctgtgactccccagatgcgtttcacccctgccgattcgagtgttttggcgatataagctgcaaccgtttgtttcatggttctccatctcctgaatgtgataacggtaacaagtttagttcatctgacggagggggaagggatgggagagaaaggaggcactaacggttaaatagcccgatgaaaggaatatcatcgggcataaggcgattatgcgagaaccaaatccccctgcggatggcaggagcaggccagtacgtaaccttcagcgatttcggcgtcggtcagcgtcattgtgctgctcaccgtatattcaccggaaaccacttttgtcttacagcagccgcaaacacccgcacggcaggcagcgacaaccggaacgttattgctttccagcgcctccagtagcgtggtgccaaccggggcgtaaaattctcgtgccggttgcagtttggtgaatttcagaccgctggtcgccgcttctgctactggggtgaagaatttctctttaaagaaacgcgtcacgccgagcgctttcacttcctgctctacccaatccatatacggagccgggccgcaggtcatcacggtacgtgaagctaagtcaggtacacctgccagcagttcgcgagtgagacgaccagcgataaagccttcggtaacgttattttctgccaccagcgttaccggatagttacgccactcatcggcgaaaataacatcctgcggcgtacgcacgttgtagatcacccgcacatcggcctgtggacggttcttcgcaagccagcgacgcatcgacataatcggcgtgacgccgcagcctgccgccagcaacaggaatttatcttctgctttatcgtcgcaggtaaattcccccatcgcgtccgaaagccagagataatcaccgcgttttacatcgcgcgtcagccactgggagccgacaccgtcatcaatccgccgcacggtcagggtgatatattcactcacgcctggcgtggaggaaatggtgtaagcacgcagcgtttccgctgagtttcgcacgctgaccagtgcatattgcccggcgcgatatgggtagtaatcgtggcaaatcagggaaatcgtccacacatccggcgtttcttgcgtaatgtgatgaacctgcatccgccacgggcattgattcgttggcatcgtcatcgacaaactccttacgcgctcaacagttgcttcatgtcttcttcaacagtggtgatagaacgcaggccgaatttctcgttcagcaccgccagcaggtctggtgtcaggaaaccaggtgcagtcgggccggtgacgatatttttcacgcccagagaaagcagcgtcagcagaatgacgatcgctttctgttcaaaccaggagagcaccagcgacagcggcagatcgttgacaccgcagcccagtttctctgccagagtgacagccagaataatcgctgagtaagcatcgttacattgacctgcatctaccagacgcggcagaccttcgatatcgccaaactcaagtttgttaaagcgatatttaccacaggcgagggtcaggatcaggcagtcatccggcacgctggtggcgaaatcggtgaagtagtggcgctcgccgcgtgcgccgtcacagccaccaagcaggaagatatgacgcagtttttcacggctcaccagatcaatcagcgtatcagcagcgccaagcagcgtctggcgaccaaaacccacggtgataaggtgcggaatttcgctgtacgggaagcctgccatctgttgcgcctgggtgataaccgcagagaaatcatcaccgtccagatgacgcacgccaggccagccaacaatgctgcgggtccagatacgatcgtcataagcgcctacggttgggtcgatgatgcagttcgaggtcatcacgatggggccagggaaacgagcgaactccacttgctgattctgccagccgctgccgtagttaccgaccagatgcttgaatttacgcagctccgggtagccatgcgcaggcagcatttcgccgtgggtgtagacattaacgcccgtgccttcggtctgttccagcaggttgtagagatctttgagatcgtgaccggaaatcagaatgcatttacccgccgtcgctttgacgttgacctgggttggcgtcgggtgaccgtatttaccggtttcgcctgcatccagaatgctcatcactttgaagttcatctggccgatttccattgaacactcaagaagcgcgttcatatcggcaggccaggtccccagccacgccatgattttatggtactgggcataaatatcgttgtcgtattgaccgagaacatgcgcgtgttccatataggccgccgcacctttcaggccatacaggcacagcagacgcaggccgagaatgttttcgccaatcgccgctttatctttgttaggggtaaattctgctgcctgacgttgcagctcgccgagatcgtcgctcaccagttgcaggtcagccatcgggttatcgacgcgcgcgttggcatctacagccaggcattgcgctttcagcgcctcgcgcagggcaatcgcttcacgagcgtagccgacaatacgcggagaatcgaagttaacgttggtcagggttgagaaaaaggcacgtggcgcgaagctgtcaacatcgtggttgatgatgccgtattcacgcgcttttaccgcccaggcagaaagcccttgcagcgccgcgatgagtaaatcctgaaggtcagaagtttccgccgttttaccacacatcccctgcgcgtatgagcagccgtttcctgccggagtacggatagtttgttcacattgcacacaaaacatgatcacaccttttaaagttatatttaatatacatgtttaaggttaagacgcttaacgcggggataaaagggatttttcatgcaactttaagggagattgatttagcgcaattttggcggcagggatctaccgccagagaggtattacgcagagaaaaaggcgatgaggatcggcactaacaggctaagaataaaaccgtgaacaattgccgccgggaccatatccagcccgccagtacgttgaagaacgggcagggtgaaatccattgatgtggcaccgcataagcccagtgcagtagagcggctgcggcgaatcagcccagggatcaacataatagcaatcagttcacgggccagatcattaaaaaacgccgcgctcccgattaccggaccaaaagattcggtcaataaaataccggaaagagaataccagccgaaaccggaggccattgccagcgcggtattgatggggagatcaagaataaaggcgttaattaaaccaccaattaatgaactgacaaccaccaccacggcgacaatcattccccggcgattaaggacaatctgctttaaggtcatgccattattgcgcaactgaataccaacgaggaaaagtagcaaaattaacgtgtattcactggcttcggtcgcgtgttgtaagaaagccagtccacttagaccaatggcaaaaccaatcactactacgccgcacagttttagcgactccagcgccatcgcaatacgcgacgggagtttttcttgctgatggtggttgcgccacggcaggcctcgctccagccacatcagggcggcaatattacacagtaaaataacggtaatactgacggcagaataatgcagaatcgccaacaggttactggcgaggttatcgagaaacgccagactgatacccataaaaaagagaataaggtaaaccatccagcttaatagctgattaataacttttaacgcagcttgttggcgaagcggaatgaggtaacccacaatcaggggaaccagaatgattaacagcccagaaaacatgaaaacccagtccttgcaaagatgaagtcgaaatgcgcgatgacacactactgaaagcggaaggacgagtaaagttgcaattaaaaggaaatgttatgcataaggagcagtagagtattcgttttcatttaaagatattcttgcgctttaattacaaactgcaccgatgttggtggcgtcaaaatcgccgaggcgttccctgaaggccggggcagcccacatggatgtgggctgagggcgcgttttacagggatgttacctcgcgcccgacccggtagccgtaagggataagtcgagggcaccgcgcagcggcgattttgttcgccagagcccgggggtgcagggggcggcggcgattggccgccccctgcgcgctccttgcgccagtggcaatatgttgcttagctcatgaaaggagcgcaacaagatgatgaatcaacatataacaacatcttaaaaaaaggcctgacattacgccaggccttctgcgttaattaatcacgcttttccagcagggtccggtaaatcagaccaccgataatgccgccgacaattggcaccacccagaagaaccacagttgttctaatgcccagccgccctggaagatagcaaccgcggtgctgcgcgccgggttaacagaagtgttagtcaccggaatactaattaagtgaatcagggttaaggccagaccaatagcgatcggcgcaaaacctgccggcgcgaatttgtcggttgcgccgtggatcaccaacaggaaacctgcactcaataccagttcaactaccagcgcggaaagcatggaataaccgcctggtgaatgctcgccataaccgttagaagcaaaaccgctggctgccgcgtcaaaacccgttttaccactggcaattaaatacagcagcgccgctgcaacaataccgccgacaacctgggcaattacgtagccaacgacttcttttgccggaaaacgtccgccagcccataaaccaatagtgaccgccgggttaaaatgaccaccagaaatatgaccaacagcaaaggccatcgtcagaacggtcagaccgaacgccaacgccacgccggcaaaaccaatgcctaattccgggaagcctgcggccagtacagcactaccacagccaccaaaaacaagccagaaagtaccaaaacattcagctgctaattttctgaacatatccaccacaattaaaaattgaccctgtgaaaaatatggtcgttttatagggtcgtcgtaaaaaagtgacgacggaaataatgcgcggctattttaaaaacgaaggcgagtcattcaccagataaataaatccagtaaatttgatttagggcaacagcgggttgccccatatagtcatttgtctgattgacagtgtagtgcacgcaaaagatttaatcctttaggcgtaataaaaaataatttatcatgctaattatttgattttgttgtttttgcagacttatcagcaagagggagtataacgcgattattcgctcatttttcagacatttgccatgcttaaatgtgatgtcatcacgtattagcaaggcctttcccgttatactgccagcgtaaaggataagtcacatatttctggaggggatatgattcttgagcgcgttgaaattgtgggttttcgcggtatcaaccgtttgtcgttgatgctggaacaaaacaacgtcctgattggggagaacgcgtggggtaaatccagcttgctggacgccttaactctgctgctatcgccagaatcagatctctaccattttgagcgcgacgatttctggttcccgccgggagatatcaacgggcgagaacatcatctgcatattattttgaccttccgcgaatcgctgccaggccgacatcgggttcgccgttatcggccgctggaagcgtgctggacgccatgcaccgatggctatcaccgtattttttatcgtctggaaggggagagtgcggaagacggcagcgtgatgacactgcgcagttttctcgataaagacggacatccgattgatgtcgaggatattaacgatcaggcacgccatctggtgcgtttaatgccggtgctgcgcttgcgtgatgcccgttttatgcgccgtattcgtaacggcacggtgccaaatgtccctaatgtggaagtcaccgcgcgccagctcgatttcctcgcccgtgagttatcctcacatccgcaaaatctctctgatgggcagattcgtcagggactttccgcaatggtacagctgcttgagcattatttctctgagcagggggccggacaggcgcgatatcgtttaatgcggcggcgagccagcaatgagcaacgaagctggcgctatctggatatcatcaaccggatgattgaccgacctggtgggcgctcgtatcgggttattttgctcggcctatttgctactttgttgcaggcaaaaggcacattgcgactggataaagacgcccgtccattgttgctgatcgaagatccagaaacccgtttacaccccattatgctttcagttgcctggcatctgttgaatcttctgccattgcagcgcattgccaccaccaactcgggtgagttgctttcgttaacgccggtagagcatgtttgccgactggtacgtgagtcctcgcgcgttgccgcctggcgtctggggccgagtggcttgagtaccgaagatagccgacgcatatcctttcacattcgttttaaccgtccgtcatcgctgtttgcacgctgctggttgctggtggaaggggaaacggaaacctgggttatcaatgaactggcgcgtcagtgcggacatcattttgatgccgaagggatcaaggtcattgagtttgcccagtccgggctaaagccactggttaaatttgcccgccgaatggggattgaatggcatgtactggtcgatggcgatgaagcagggaagaaatatgccgctacggtacgcagcctgttgaataacgatcgggaagccgaacgagaacatttaacggcgttaccggcgctggatatggaacattttatgtatcgccagggattttccgatgtgttccaccgcatggcgcaaatcccggaaaatgtaccgatgaatctacgcaaaattatctcgaaagcgatccatcgctcttccaaacccgatcttgccattgaagtggcaatggaggcaggacgtcgtggtgtggactccgtaccgacgctgctgaaaaaaatgttctcacgcgtgctgtggctggcgcgcggtcgcgcggattaaccgcgaaacatcgtggccatttgtggctgaatagcgtcgagcatctcatagcgccgacggtattcagcccgttttttactggcgatttcggcaatctcttttcgtgctatctgtgctggaaggcggtaatggcgttcagcatcacatacgccgccaaccgattcccagaaagcgttgtaatcagcgtggatcttgccttctttatcgcgataacgcaggctgcggtaaatatgcgtttcattgctgacggcaataatctgctctacctgcaaacgttgggcaaacagacaggccgcttccatcacgaggcgtttgggaaatagcccgtggcaggctttcgtcgcattctggatttcctgatgtggaatttcccattttgcgccttgcagtccgccaataaacatcgttcttttcccctgatattcacacagggtaaacgtgatctctgccagaggaataccttcgctgttgcggaacaggattgtgctgtcaccttctttatccattgagatcatcatggtcagctcaagcgtgaactgctcgccgtttttgccttccagcttcgccagttgcagcccgggggtattcaaatataagctgaattcttccgccgacatacattcgcggagtaacgcataatggtaacgtaacgcctccagcaattgcttacggctaagattcgccgcaaggtaagggcgatgcagacgcacaggcagtcgcggctggcgcgttaacaatacattgagattaggccagtgggaaagttcgttcatccactcaacgcttaaacgcggcataatcaacgagcgcagcaaaaatttctggcgaaaactacggcgatgccagaatttacccggccgacactgtccacgtgccagactaagaaaaagtgacaggctgctgagagattcagatggcgtaaaggtccgttcagttagctgcgacatattcatgaaatcaatggttatacatggcgtcgatttcaccattgcgtatcttaaccaaacatcaatagtgtgattactaacgtaaattttagggttttgttgatatttcgttgaagttaatgacccggattggcatatggagtattcagaaaatttatgaaaaagcggaaaaccgtgaagaagcgttacgttattgcgctggtgatagtcatcgccggactgattacgttatggagaattcttaacgcacccgtgccgacttatcagacgctgattgtgcgccccggtgatttacagcaaagcgtgctggcgaccggaaagctggacgcgctgcgtaaggttgatgtgggcgcgcaggtcagcggtcagttgaaaactctgtcggtggcgattggcgataaagtaaaaaaagaccagcttttaggggttattgatcctgaacaggctgaaaaccagattaaggaggtcgaagcaacgctgatggagctacgtgcgcagcggcagcaggcggaagcggagctgaaactggcgcgggtgacgtattcccgtcagcaacgtctggcacaaacgaaggctgtttcacagcaggatctcgacaccgccgcgacggagatggctgtgaaacaggcgcaaattggcaccattgacgcgcaaatcaagcgcaatcaggcttctctcgatacggctaaaaccaatctcgattacactcgcatcgttgccccgatggccggggaagtcacgcaaatcaccactctgcaaggccagacggtgattgccgcacaacaagcaccgaacattctgacgctggcagatatgagcgccatgctggtaaaagcgcaggtttctgaagcggatgtaatccacctgaagccggggcaaaaagcctggtttacggtgcttggcgatccactgacgcgctacgaggggcaaatcaaggatgtactaccgacgccggaaaaggttaacgacgctattttctattacgcccgttttgaagtccccaaccccaatggtttgctgcggctggatatgactgcgcaagtgcatattcagctcaccgatgtgaaaaatgtgctgacgatccctctgtcggcgttaggcgatccggttggcgataatcgttataaagtcaaattgttgcgtaatggtgaaacacgcgagcgtgaagtgacgattggcgcacgtaacgataccgatgttgagattgtcaaagggcttgaagcgggcgatgaagtggtgattggtgaggccaaaccaggagctgcacaatgacgcctttgctcgaattaaaggatattcgtcgcagctatcctgccaattaataataagttgaggtgctgaagggcatcagcctcgatatttatgcgggtgagatggtcgcgattgttggcgcttcgggttccggtaaatcgaccctgatgaatattctcggctgtctggataaggccaccagcggcacctatcgcgtcgccggtcaggatgttgccacgctggacgccgatgcgctggcgcaactgcgccgcgagcatttcggctttattttccagcgttaccatttgctttcgcatttaaccgccgagcagaacgttgaagtacccgccgtctatgctggtcttgagcggaaacagcgactgcttcgtgcccaggagttgctgcaacggctggggctggaagaccgtacagagtattatccggcacagctttcgggtggtcagcaacagcgcgtcagcatcgcgcgggcattgatgaacggtggtcaggtaattcttgccgatgaaccaaccggcgcactggacagccattctggcgaagaggtgatggcgatcctgcatcagctgcgcgatcgtgggcatacggtgattatcgtcacccacgatccgcaggtcgctgctcaggccgagcgggtgatcgaaattcgcgacggcgaaattgtgcgcaatcctcccgccattgaaaaagtgaatgttactggcgggacggaacctgttgtcaacacggtgtctggctggcggcagtttgtcagcggttttaacgaggcgctgacgatggcatggcgggcgctggcagcgaataaaatgcgtactttactgaccatgctggggattattatcggtattgcgtcggtggtttccattgtcgtggtgggtgacgccgccaaacaaatggtgctggcggatattcgttctattggtacgaatactattgatgtctatcccgggaaagattttggcgatgacgatccgcaatatcagcaggcgctgaagtacgacgacttaatcgccatccaaaaacaaccgtgggtcgcctcagccacacctgccgtctcgcaaaacctgcgcctgcgttataacaatgttgatgttgctgccagtgccaatggcgtgagcggcgattattttaatgtctatggcatgaccttcagtgaaggaaacacctttaatcaggagcagctgaacggtcgtgcgcaggtcgtggttctcgacagtaatactcgccgccagcttttcccccataaagcagatgtggttggcgaggtgattctggtcggcaatatgcccgccagagtcattggtgtggcggaagaaaaacagtcgatgtttggtagcagtaaagtgctgcgtgtctggctaccttacagcacgatgtccgggcgagttatgggccagtcgtggcttaactccattactgtcagggtgaaagaaggatttgacagcgccgaggcggaacagcaactcacgcgtttactttcactgcgccacggaaagaaggatttctttacctggaacatggacggcgtcttgaaaactgttgaaaagaccacacgtactttacaactgtttctgacgctggtggcggtgatttcgctggtggtgggcggtattggtgtaatgaatattatgctggtgtcagtgaccgagcggacgcgggaaattggcattcgcatggctgtaggtgcgcgagcaagcgatgttttgcaacagttcctgatcgaagccgtactggtttgcctggtcggtggcgcgttgggaataacactgtcactgttaattgctttcaccttgcagcttttcttacccggctgggagattggtttttcaccgttggcgctgctgctggcgtttctctgctcgacggtcaccgggattttatttggctggttacccgcacgaaatgcggcacgactggatccagtagatgctctggcacgagagtaatttttgagataaaaatgccagccgatcgggctggcattttgcctttaggatgtacacaatgagacagaagagctatgcgactgccgcttctacttcgacgggcacaataacactggcgtgattgccttttggcccctggtggacatcaaactgaacggattgtccagcttttagcgttctgtaaccatccatctgaatggtggaataatgagcgaaaatatcttcgccgccgccttcagggcagatgaaaccaaaccctttggcattgttgaaccacttaacagtacccttttccatgcttcgacatccttcgcaaatcttatacaagtaagatggaataaaccggggtcagagagggggctgttcaaaacctcgccaactctagaaatacaatttagagaattagggcgagccgtcaagcatttgacaggggacaaggggcaggtatgaatcaaaaatttgaagcagttaacgctattgacaggaatgtgacagatgtcgctgatgccaacgatagatgatagttatctatcatgtggagtagattggtcaggcaaataagctcttgtcagcggcagggcgttctgccgataaccgtaaccgaagatgataactgacaatgggtaaaacgaacgactggctggactttgatcaactggcggaagaaaaagttcgcgacgcgctaaaaccgccatctatgtataaagtgatattagtcaatgatgattacactccgatggagtttgttattgacgtgttacaaaaattcttttcttatgatgtagaacgtgcaacgcaattgatgctcgctgttcactaccaggggaaggccatttgcggagtctttaccgccgaggttgcagaaaccaaagtggcgatggtgaacaagtacgcgagggagaatgagcatccattgctgtgtacgctagaaaaagcctgaatgcaggcataaaaattgggggaggtgcctatgctcaatcaagaactggaactcagtttaaatatggctttcgccagagcgcgcgagcaccgtcatgagtttatgaccgtcgagcacttgttactggcgctgctcagtaacccatctgcccgggaggcgctggaagcgtgttctgtggatttggttgcgctccgtcaggaactggaagcctttattgaacaaaccacacccgttctgcctgccagtgaagaggagcgcgacacacagccgacgctgagttttcagcgtgtactgcaacgtgcggtcttccatgtccagtcctccggtcgcaatgaggttaccggtgcaaacgttctggtcgctatctttagcgaacaggagtcgcaggcggcatatctgttgcgtaaacatgaagtcagccgtctcgatgtggtgaactttatctctcatggcacgcgtaaagacgagccgacacagtcttctgatcctggcagccagccaaacagcgaagaacaagctggtggggaggaacgtatggagaatttcacgacgaacctgaatcagcttgcgcgcgtgggcggaatcgacccactgattggtcgtgagaaggagctggagcgtgctattcaggttctctgccgtcgccgtaaaaacaacccgctgctggtgggggaatctggtgtcggtaaaaccgcgattgcggaaggtcttgcctggcgaattgttcagggcgatgtgccggaagtgatggctgactgtacgatttactctctcgatatcggttctctgttagcgggcacaaaatatcgcggcgactttgaaaaacgttttaaagcgttgctcaagcagctggagcaggacactaacagcatcctgtttattgatgagatccacaccattatcggtgcgggtgcagcgtctggtggtcaggtcgatgcggctaacctaatcaaaccgttgctctccagcggtaaaattcgtgtaattggttcgacaacctatcaggagttcagcaacattttcgagaaagaccgtgctctggcgcgtcgcttccagaaaattgatattactgaaccgtcgatcgaagaaactgttcaaatcatcaatggcctgaaaccgaagtatgaagcgcaccacgacgtgcgttataccgcaaaagcggtgcgtgcggcggtagagctggcggtgaaatacattaacgatcgtcatctgccggataaagccattgatgttatcgacgaagcgggcgctcgcgcacgcctgatgccggtaagcaaacgcaagaaaaccgttaatgtggcggatattgagtccgtggtggcccgtattgcacgcattccagagaagagtgtttctcagagtgatcgtgataccctgaaaaacctcggcgatcgcttgaaaatgctggtcttcggtcaggataaagccattgaggcgctgactgaagccattaagatggcgcgtgcaggtttaggtcacgaacataaaccggttggttcgttcctgtttgccggccctaccggggtcgggaaaacagaggtgacggtacagctttcgaaagctttgggcattgagcttctgcgctttgatatgtccgagtatatggaacgccataccgtcagccgtcttattggtgcgcctccgggatacgttggttttgatcagggcggtttgctgactgatgcggtcatcaagcatccacatgcggtgctgctgctggacgaaatcgagaaagcgcacccggacgtgttcaatattctgttgcaggtgatggataacggtacgctgaccgataacaacggacgcaaagcagacttccgtaacgtggtgctggtgatgaccaccaacgccggggtacgggaaactgagcgcaaatccattggtcttatccaccaggataacagcaccgatgcgatggaagagatcaagaagatctttacaccggaattccgtaaccgtctcgacaacattatctggtttgatcatctgtcaaccgacgtgatccatcaggtggtggataaattcatcgtcgagttgcaggttcagctggatcagaaaggtgtttctctggaagtgagccaggaagcgcgtaactggctggccgagaaaggttacgaccgggcaatgggcgctcgtccgatggcgcgtgtcatccaggacaacctgaaaaaaccgctcgccaacgaactgctgtttggttcgctggtggacggcggtcaggtcaccgtcgcgctggataaagagaaaaatgagctgacttacggattccagagtgcacaaaagcacaaggcggaagcagcgcattaatctgattgttaggtaggttggtcaagtccgtaatctcgaaagaggttacggactttttgtttatggggtggaggaggttcagaccctttttttaatgatgatggtaagttgttgataattagtgctgcgggaaggtaaggataaaaaagggtgctgcaggagaatgggatggttttgctttattaacaacgggctaaacgtgtagtatttgagttcactgccgtacaggcagcttagaaattcacaggtaacatactccacccgcccaccatgttcactgccgtacagacagataaaatgcgaaaaaaaagctcgcactttcgtacgagctcttctttaaatatggcggtgagggggggattcgaacccccgatacgttgccgtatacacactttccaggcgtgctccttcagccactcggacacctcaccaaattgttttgctaccaaacctcatgggtggcaacggggcgctactatagggagttggagtaaaacggtcaagaagaattttaatgataattattgtttgctcatactgtaaacaagttgtgcagtatatctacatcgagacaagttacggacttatacttccaaagtacttcatacatatcacaaaataaaaaggccggttaaaccgaccttttactcgttctttctcttcgcccatcaggcggtaaaacaatcagcgactacggaagacaatgcggcctttgctcaggtcgtacggggtcagttcaacagtcactttgtcgcccgtcaggatgcggatgtagtttttgcgcattttaccggagatgtgtgcagtaaccacgtgaccgttttctaactctacgcggaacatggtattaggcaacgtttcaagaacggtaccttgcatttcaatattgtcttctttggccatctaatcctctggggtatcactaccgtaatttgaaccggcaagataatgccgaagttctgtaaataagtaaagatttgcgcgctaaatcgcaacaaacaggttcggcacattactccgaaaacacacggctaagccgcaccaaaagcgcaacgtataagggagcggtgagataaacgatgggcgttacctgacgcgaaaaattccttatcggcagcggggtaatgagcgtaaccaactctgcgaccgcaattataacactctggggagaaatgtgccgaaaacattcattcttgtggtgaaaacaagcatcgtggtacccagaaattattcggcaatcgtccgaggcgcatttgattgagataattaaggtaatcccggcggggaatttcgcaggcaccaagcgatgctgtgtgatcgttaaggacctggcagtcgataagcttaccgccatgaccgataaattcctcacagaataccagaagcgccgttttagacgcattttccatccggctgaacatggactcgccacaaaatagcgttccctgggccacgccgtacataccgccgacaagctcatcttcacgccagacttcaatggagtgggcatggccgagttcgtgaaggcgatggtaggcttcgaccacgccacgcgtgatccaggttccttcttcgcgatcgctggcacagccttcaatgacctgaccaaaagcgtaattcatcgtgacacgatagggcgagcgtttatgaaatcgcttcatactacggctgatatgcagtgattctggccatagcaccgcgcggggatcgggcgaccaccagaggatggggtcgcctggagaaaaccacggaaaaataccacgctggtaagccattaacaggcgcgcagggctaagatcgcccccaagtgccagcaggccgttaggctcacgtaatgcgccttccggggaagggaaggctattgaatggcgagaaagctgaaccaggcgcatgaccgcaaaactccacgcaagtcggatcgttcaataatagcttacaaaccctgcttgaactggtaataacgcccctgtctggcaagcagttctgcgtgagtaccttgctcaataatttgcccgttgtccatcactattatttgttggaaacgagagagtccgcgaagtcgatgggtgaccattaacaccgttttctcacgcatcatttctgcaagcaattcaaggatctggctttcggttgtggcatctaagccttcggtaggttcatccagcaacaccagtggcgcatcatgtaacagcgcacgggcgatagccagacggcgcagttcaccaccggagagctggcgtccgccttcacctaaccaactgttgagacctgcatcctcgagcagcttttccaggccaacgcgacgcaagatctccgacagagcctcatcactactgccaggcgaggcgagtaaaagattatcacgcagcgtggcgctaaacagatgcactcgctgaggaacaacgctgatggtctgtcgtagagccgcttcattcaggctggctatggggctatcgttaagcaaaatctcgccctgttgcgggtcccatgcgcgggtcagctgttgtaacagtgttgatttgccgcatccggttcgcccgagaatcgctatatgttccccggcgtttacctgaagagaaatccctttaagtgcctgttgagattgctccggataagtgaactgaacatcccgtaacgtcagcgaaacgcgatcggcaacacgagtttgggtatcaggaaaggtgacctccggtttttgatccgttaagtcagagatacgtacggcagaggcaatgacttgccccagatgctgaaatgcacccgttactggtgccagtgcttcaaacgcggctaacgcgcagaagacaaacagggcaattaacgcgccgggttgagcattgccgccaacgccgccagacgccatccacagcatcaggatcaccgctaacgcgccaatgagcagcattatcgcttgcgacaatgcggtcagttcagattgacggcgttgcgcttccagccattgaatttctgtattctctagttgcgtgcgataacgatcgctggcaccaaaaatggtcagctcagcttgcccttgcagccaggccgtcagttgttggcgatactgtccgcgaagatgagtcagattttgcccggtgctttttcccgcacgataaaacagcggtggcatcaggaaaagcgtcagtaacataatgccgcccagcgtaaaggcgagggtgaaatcaaggaaacttaacccgattgtcaccaccataatcaccacaaaagcgcccaccagcggcgagataacgcgcaggtaaagatgatcgagcgtatcaacatccgccaccacgcgattgagcaattcgccctgacgatagcgcgccagtccggcaggggagaggggcagcaatttgctgaaggtgtaaatgcgcagatgctgcaacacgcggaaagtcgcgtcgtgacttaccagacgttcaaaatagcgcccggcagtacgggtgattgctgcgccacgcacgcccgcagcgggtagcatatagttgaagctgtacagtccggcaacccccgcaaccgctgaggccgagaggaaccagccggaaagtgtcaacagaccgatactggcgagcagcgtcacaattgccagcacaataccaagacttaacatccatttatgacgtttatacagtgccagatagggtagcaaagcgcgcatttaaatctcctcctgacgatgggccagtaatgtggcgaatgggccaccagccacacttaattccgcgtaacgtccttgctcaataatccggccatcctgcataacccaaatgacatcccagtcagcaagatcttctaactggtgggtgaccattaacgttgtctggcgcagagaggcggcattcagcgcctccattacgcgctgttcactgtgagcatcaaggctggcagcgggttcatccaacagtaatagcgaacagggatttagtaacgcacgggccaccgccacgcgctgcgcctgccccacggaaaggcgggcagcctggtcgccaacaggcgtatcaacgccttgtgggaggagcggtagaaactcgctgacccaggcgttatccagcgctgcttgtaattcttgttcgctggcatcaggtcgcgccagtagtacgttatcccgcaatgttgctgccggtaattgtgggttttgcccaacccaggagagatgtttacgccatgattctggtgataaatcgcgtaattctatcccgttgattcgtagcgatccctgatatgagagaaaaccagaaagcgcgttcagcagtgagcttttacctgaaccgctgcgaccaaccaacaccgcacgttggcctgctggcaaagtaaagttcagcggtccggccagcgttttaccttccggcgacgtgataaacagctcctcggcctcaatggtcaccggatcggtcgatgctaattccgcctcaccacgttgcggatgggcgagcggggtttccataaacgttttcagactgtcagctgcgccaacagcctgggctttagcatgataaaacgtaccgagatcgcgtaatggctggaaaaactctggcgcaaggatcagggccagaaaacccgcagccagcgtcacaccggtatcgtagtgaccaaaatccagctcgccgagataggaaaaaccaaagtagaccgccaccagagcaattgacagcgaggtaaaaaattcgagaatgccggaggataaaaacgccagccgtagcacttccattgtccgttggcggaaatcttccgaagcagaacgaatactttcaatttcagcttcaccacgaccaaaaatacgcaatgtttccatgccgcgcaggcgatcgaggaaatgcccacttaagcgagcaagagcgagaaagttacgtcggttagcatcggcagcccccattccaaccagcgccataaacaacggaattaacggtgcagtgcccagcagaatgagcgccgcagcccagttagaggggaagattgccaccacaatcagcaacggcaccgacactgccagcgccatttgcggcagatagcgtgcatagtaatcatgcatatcgtcaatttgctcgagtaccagcgtcgcccagctccccgcaggtttaccctgaatccacgctggccctgcttgttgcagacggtcgagaacctgacggcggatggcaaagcggatatgctgcccggcgtgataacccacccgttcgcgtaaccagaccacccatgcgcgcagtacaaaggtcagaaccagtaacgtaaagggaagcagcagggcttcacggggaatattctccataatcatatgttgcagaattcgcgccatgaaccaggcctgggcaatgatcaatatgccgctcacaaagcccagcagacgagaaatattcagccaacgttgggagatgacgctttgctgttttaaccagcgggttaactctttttgacgagatttattcattgcacgcttagcaggtgagttatcagaattatttgcagagcaatgttacaacggggaaaaaataaaggcgacccatagtcgcatggtgtcgccttctttacttttgttactgatttgtaaaattattttgcgtcagctaaaccatcgaggtagcgttccgcatcaagtgctgccatgcagcctgtaccggccgaagtaatggcctggcgataaatgtgatccatcacgtcgcctgcggcaaagacgccaggaatgctggtctgggtggcattaccatgaatacccgactgtactttgatgtagccgttttccagttccagctgcccttcgaaaatcgcagtattcgggctgtgaccgatagcaacaaacagaccggcaacgtcgagtgactcgatgttatcgctgttttgcgtatcgcgcagacgaacgccagtgacacccatttgatcgccggtcacttcttccagcgtacggttggtgtgcagaatgatgttgccgttctccactttatccatcaggcgcttaatgaggattttttccgcgcggaaaccgtcacggcggtgaatcagatgcacttccgaagcgatgttagacagatacagcgcctcttcaaccgcggtattgccgccgccgatgaccgcaactttctggttgcgatagaagaaaccgtcgcaggttgcacaagcagaaaccccacggcctttaaaggcttcttcagagggcaggccgagatagcgtgcagaagctccggtggcaataatcagcgcgtcgcaagtgtattcgccgttatcgccattcagacggaacggacggttttgcagatccaccttgttgatatgatcaaaaatgatctcagtttcaaacttggtggcatgttcgtgcatgcgctccattaataacggaccggtcagatcgtttggatcgccaggccagttttccacttccgtggtggtggtcagttggccgcctttttccatgccggtaatcagcacaggttgcaggttggcgcgcgccgcgtagacagcagcggtgtatcccgccgggcctgaacccaggataagcagtttactgtgtttggtcgtgcccatgagatccccatagttgttggcagacaatgggcaggattgtagggaatttacagacgtaaaaaaagagtatgacgattttgttaacaatttgtgcaatcggcagcatcgataagcaggtcaaattctcccgtcattatcacctctgctacttaaatttcccgctttataagccgattaaatgatgaataaacgcccctgttaatgaatatctggcatgttgtactaaaaatcgatgttttgctttgacaatcccctggtgttttgcgaaaacattcgaggaagaaaaaaaacagtattcttatatgcgcataaccatgcatgtaaataccatgtttaccgtgctagtgaaatctacgtatggcgtggacagacgccattcgtgatgtcgatagctgccacaaggcaacggtcttctcaccgtagacccaggcattgcgcgccgtgaatcttcatgatttcggtctatcgtgacgggtagcgactctgaacagtgatgtttcagggtcagacaggagtagggaaggaatacagagagacaataataatggtagatagcaagaagcgccctggcaaagatctcgaccgtatcgatcgtaacattcttaatgagttgcaaaaggatgggcgtatttctaacgtcgagctttctaaacgtgtgggactttccccaacgccgtgccttgagcgtgtgcgtcggctggaaagacaagggtttattcagggctatacggcgctgcttaacccccattatctggatgcatcacttctggtattcgttgagattactctgaatcgtggcgcaccggatgtgtttgaacaattcaataccgctgtacaaaaacttgaagaaattcaggagtgtcatttagtatccggtgatttcgactacctgttgaaaacacgcgtgccggatatgtcagcctaccgtaagttgctgggggaaaccctgctgcgtctgcctggcgtcaatgacacacggacatacgttgttatggaagaagtcaagcagagtaatcgtctggttattaagacgcgctaacacggaacaggtgcaaaatcggcgtattttgattacactcctgttaatccatacagcaacagtactggggtaacctggtactgttgtccgttttagcatcgggcaggaaaagcctgtaacctggagagcctttcttgagccaggaatacattgaagacaaagaagtcacattgacaaagttaagtagcggccgccgccttctggaggcgttgctgatccttattgtcctgtttgccgtctggttgatggctgccttactaagctttaacccttcggaccccagctggtcgcaaacggcctggcatgaacctatccataatttaggtgggatgcccggtgcgtggttggcagatacgctgttctttatttttggcgtgatggcttacaccattcccgtcattattgtcggcggttgttggtttgcctggcgtcatcagtccagcgacgaatacattgattattttgccgtttcgctacgcatcattggcgttttggcgctcatccttacctcctgtggtctggcggcaatcaacgctgacgatatctggtattttgcctccggtggcgtcattggcagcttactaagcactacgctacaaccactgctacacagtagcgggggaactattgcgctgctctgcgtttgggcagcgggcctgacgttgttcaccggttggtcatgggtgaccattgctgaaaaactcggcggctggattttaaacattctcaccttcgccagtaatcgtacccgtcgcgatgatacctgggtcgatgaagatgagtatgaagacgacgaagagtatgaagatgaaaatcacggcaaacagcatgaatcacgccgtgcccgtattcttcgcggcgcgctagcgcgtcgtaaacggttggcggaaaaattcattaatccgatggggcggcaaacagacgctgcgttgttctccggtaagcggatggatgatgacgaagagattacctacactgcacgcggtgtggctgccgacccggacgacgtcctattttcgggcaatcgtgcaacgcagccagaatatgacgaatacgatccattattaaacggtgcgccaattaccgaacctgtcgctgtagcagctgctgctaccacggcgacacaaagctgggctgcgccggttgaacctgtgactcagacgccgcctgttgcctctgttgatgttccacctgcgcaacctacagtagcctggcagcctgtaccgggtccacaaacgggagagccggttattgctcctgcaccggaaggttacccacagcagtcacaatatgcgcagcctgcagtgcaatataatgagccgctgcaacaaccagtacagccgcagcagccgtattatgcacctgcagctgaacaacctgcgcaacagccgtattatgcccctgcgccagaacaaccggtggcaggtaacgcctggcaagccgaagagcagcaatccacttttgctccacagtctacataccagactgagcaaacttatcagcagccagccgctcaggagccgttgtaccaacagccgcaacccgttgaacagcagcctgttgtggagcctgaacccgttgtagaagagacaaaacccgcgcgtccgccgctttactactttgaagaagttgaagagaagcgagcccgtgaacgtgaacaacttgcggcctggtatcaaccgattccagaaccggttaaagaaccagaaccgatcaaatcttcgctgaaagcaccttctgttgcagcagtacctccagtagaagccgctgccgctgtttccccgctggcatctggcgtgaaaaaagcgacactggcgacgggggctgccgcaaccgttgccgcgccagtcttcagtctggcaaatagcggtggaccgcgtcctcaggtcaaagaggggattggtccgcagttgccacgaccgaaacgtatccgcgtgccaactcgtcgtgaactggcgtcttacggtattaagctgccctcacagcgtgcggcggaagaaaaagcccgtgaagcccagcgcaatcagtacgattctggcgatcagtacaacgatgatgaaatcgatgcgatgcagcaggatgaactggcacgtcagttcgcccagacacagcagcaacgctatggcgaacagtatcaacatgatgtgcccgtaaacgcagaagatgcagatgctgcggcagaggctgaactggctcgtcagtttgcgcaaactcaacaacaacgttattccggcgaacaaccggctggggcgaatccgttctcgctggatgattttgaattttcgccaatgaaagcgttgctggatgatggtccacacgaaccgttgtttacgccaattgttgaacctgtacagcagccgcaacaaccggttgcaccgcagcagcaatatcagcagccgcaacaaccagttccgccgcagccgcagtatcagcagccacaacagccggttgcgccgcagccacaatatcagcagccgcaacaaccggttgcgccacagcagcaatatcagcagccgcaacaaccggttgcgccgcagcagcagtatcagcagccacaacagccagttgcgccacaaccgcaggataccctgcttcatccgctgttgatgcgtaatggcgacagccgtccgttgcataaaccgacgacgccgctgccttctctggatttgctgacaccgccgccgagcgaagtggagccggtagatacctttgcgcttgaacaaatggctcgcctggtggaagcgcgtctggctgatttccgtattaaagccgatgtcgtcaattactctccggggccggttatcactcgctttgaattgaacctggcaccgggcgtaaaagcggcgcgcatttctaacttgtcacgggaccttgcccgttcactttcgacggtggcggtgcgtgtcgttgaagttattcctggcaaaccctatgtaggtctggagttaccgaataaaaaacgacaaaccgtttatctgcgcgaagttttggataacgccaaattccgcgataatccgtcgccattaaccgtggtgctgggtaaagatatcgccggtgagccggtggttgccgatctggcgaaaatgccgcacttgttggttgcggggactaccggttccggtaaatctgtcggtgtgaacgcgatgatcctgagcatgctttataaagcacagccagaagatgtgcgtttcatcatgatcgacccgaaaatgctggagctttcggtttatgaaggcattccgcatctgttaacggaagtcgttactgatatgaaagatgccgccaacgcgctgcgctggtgtgttaacgagatggagcgtcggtataaactgatgtctgcgctgggtgtgcgtaatctggcgggttataacgaaaaaattgctgaagccgatcgcatgatgcgtccgattccagacccgtactggaagccgggtgacagtatggatgcccagcatccggtgctgaaaaaagaaccatacattgtggtgttggttgacgaatttgccgacctgatgatgacggtaggtaaaaaagtggaagagctgatagcacgtctggcgcaaaaagcccgtgccgcgggtatccacctcgtactggcaactcagcgtccatcggttgatgttattactggtctgattaaagcgaatattccgacccgtatcgcctttaccgtatccagtaagattgactcacgtaccattcttgatcaggctggcgcggaatcactgctgggtatgggggatatgctctactctgggccgaactccacgttgccggtacgtgtccatggtgcttttgttcgcgatcaggaagttcatgccgtggtgcaggactggaaagcgcgtggtcgcccacagtatgttgatggcatcacctccgacagcgaaagcgaaggtggtgcgggtggtttcgatggcgctgaagaactggatccgttgttcgatcaggcggtgcagtttgtcactgaaaaacgcaaagcgtcaatttctggcgtacagcgtcagttccgcattggttataaccgtgcagcgcgtattatcgaacagatggaagcgcaggggattgtcagcgaacaggggcacaacggtaatcgtgaagtgctggccccaccgccgtttgactaactaatgcatcgtatgccggataaggcgcggtagcgtcgcatccggcactctatcaactgaaaattcagtattttcttctttcctcaagctgattattagcctggaatagagagtagagggaactcccgatcgggagtgacgtaatttgaggaataatgatgaaaaaaattgccatcacctgtgcattactctcaagcttagtagcaagcagcgtttgggctgatgccgcaagcgatctgaaaagccgcctggataaagtcagcagcttccacgccagcttcacacaaaaagtgactgacggtagcggcgcggcggtgcaggaaggtcagggcgatctgtgggtgaaacgtccaaacttattcaactggcatatgacacaacctgatgaaagcattctggtttctgacggtaaaacactgtggttctataacccgttcgttgagcaagctacggcaacctggctgaaagatgccaccggtaatacgccgtttatgctgattgcccgcaaccagtccagcgactggcagcagtacaatatcaaacagaatggcgatgactttgtcctgacgccgaaagccagcaatggcaatctgaagcagttcaccattaacgtgggacgtgatggcacaatccatcagtttagcgcggtggagcaggacgatcagcgcagcagttatcaactgaaatcccagcaaaatggggctgtggatgcagcgaaatttaccttcaccccgccgcaaggcgtcacggtagatgatcaacgtaagtagaggcacctgagtgagcaatctgtcgctcgatttttcggataatacttttcaacctctggccgcgcgtatgcggccagaaaatttagcacagtatatcggccagcaacatttgctggctgcggggaagccgttgccgcgcgctatcgaagccgggcatttacattctatgatcctctgggggccgccgggtaccggcaaaacaactctcgctgaagtgattgcccgctatgcgaacgctgatgtggaacgtatttctgccgtcacctctggcgtgaaagagattcgcgaggcgatcgagcgcgcccggcaaaaccgcaatgcaggtcgccgcactattctttttgttgacgaagttcaccgtttcaacaaaagccagcaggatgcatttctgccacatattgaagacggcaccatcacttttattggcgcaaccactgaaaacccgtcgtttgagcttaattcggcactgctttcccgtgcccgtgtctatctgttgaaatccctgagtacagaggatattgagcaagtactaactcaggcgatggaagacaaaacccgtggctatggtggtcaggatattgttctgccagatgaaacacgacgcgccattgctgaactggtgaatggcgacgcgcgccgggcgttaaatacgctggaaatgatggcggatatggccgaagtcgatgatagcggtaagcgggtcctgaagcctgaattactgaccgaaatcgccggtgaacgtagcgcccgctttgataacaaaggcgatcgcttttacgatctgatttccgcactgcataagtcggtacgtggtagcgcacccgatgcggcgctgtactggtatgcgcgaattattaccgctggtggcgatccgttatatgtcgcgcgtcgctgtctggcgattgcgtctgaagacgtcggtaatgccgatccacgggcgatgcaggtggcaattgcggcctgggattgctttactcgcgttggcccggcggaaggtgaacgcgccattgctcaggcgattgtttacctggcctgcgcgccaaaaagcaacgctgtctacactgcgtttaaagccgcgctggccgatgctcgcgaacgcccggattatgacgtgccggttcatttgcgtaatgcgccgacgaaattaatgaaggaaatgggctacgggcaggaatatcgttacgctcatgatgaagcaaacgcttatgctgccggtgaggtttacttcccgccggaaatagcacaaacacgctattatttcccgacaaacaggggccttgaaggcaagattggcgaaaagctcgcctggctggctgaacaggatcaaaatagccccataaaacgctaccgttaatgttatcgttgcggtaatgttgttactgtatccctgtggtcgcaggctgtggccacatctcccatttaattcgataagcacaggataagcatgctcgatcccaatctgctgcgtaatgagccagacgcagtcgctgaaaaactggcacgccggggctttaagctggatgtagataagctgggcgctcttgaagagcgtcgtaaagtattgcaggtcaaaacggaaaacctgcaagcggagcgtaactcccgatcgaaatccattggccaggcgaaagcgcgcggggaagatatcgagcctttacgtctggaagtgaacaaactgggcgaagagctggatgcagcaaaagccgagctggatgctttacaggctgaaattcgcgatatcgcgctgaccatccctaacctgcctgcagatgaagtgccggtaggtaaagacgaaaatgacaacgttgaagtcagccgctggggtaccccgcgtgagtttgactttgaagttcgtgaccacgtgacgctgggtgaaatgcactctggcctcgactttgcagctgcagttaagctgactggttcccgctttgtggtaatgaaagggcagattgctcgcatgcaccgcgcactgtcgcagtttatgctggatctgcataccgaacagcatggctacagtgagaactatgttccgtacctggttaaccaggacacgctgtacggtacgggtcaactgccgaaatttgctggcgatctgttccatactcgtccgctggaagaagaagcagacaccagtaactatgcgctgatcccaacggcagaagttccgctgactaacctggtgcgcggtgaaatcatcgatgaagatgatctgccaattaagatgaccgcccacaccccatgcttccgttctgaagccggttcatatggtcgtgacacccgtggtctgatccgtatgcaccagttcgacaaagttgaaatggtgcagatcgtgcgcccagaagactcaatggcggcgctggaagagatgactggtcatgcagaaaaagtcctgcagttgctgggcctgccgtaccgtaaaatcatcctttgcactggcgacatgggctttggcgcttgcaaaacttacgacctggaagtatggatcccggcacagaacacctaccgtgagatctcttcctgctccaacgtttgggatttccaggcacgtcgtatgcaggcacgttgccgcagcaagtcggacaagaaaacccgtctggttcataccctgaacggttctggtctggctgttggtcgtacgctggttgcagtaatggaaaactatcagcaggctgatggtcgtattgaagtaccagaagttctgcgtccgtatatgaacggactggaatatattggctaatacccaatttttctgaatctaaaaagcgcctgcgggcgctttttttgtctccctttgataccgaacaataattactcctcacttacacgtaatactactttcgagtgaaaatctacctatctctttgattttcaaattattcgatgtatacaagcctatatagcgaactgctatagaaataattacacaatacggtttgttactggaatcaatcgtgagcaagcttgagtgagccattatgaaaacgaaaatccctgatgcggtattggctgctgaggtgagtcgccgtggtttggtaaaaacgacagcgatcggcggcctggcaatggccagcagcgcattaacattaccttttagtcggattgcgcacgctgtcgatagcgccattccaacaaaatcagacgaaaaggttatctggagcgcctgtacagttaactgtggtagtcgctgcccgctacgtatgcacgtcgtggacggtgaaatcaaatatgtcgaaacggacaataccggcgatgacaattacgacggcctgcaccaggttcgcgcctgcctgcgtgggcgttccatgcgtcgccgtgtctacaatccggaccgcctgaaatatccgatgaaacgagtcggggcgcgcggtgaaggcaaattcgagcgcattagctgggaagaagcctacgacatcatcgcgaccaatatgcagcgcctgatcaaagagtacggcaacgagtctatctatctgaactatggcaccggtacgctgggcggcaccatgacccgctcctggccgccgggaaataccctggtcgcgcggctgatgaactgctgcggcggctatctgaaccattacggcgactactcctccgcgcaaattgcggaaggtttgaactatacctacggcggctgggcagatggcaacagcccgtcggatatcgaaaacagtaagctggtagtgctgtttggtaataaccctggcgaaacgcgaatgagtggcggtggggtgacttactatcttgaacaggcacgccagaaatctaatgcccgcatgatcatcatcgatccgcgctataccgacaccggtgccgggcgcgaagatgagtggatccctattcgtccgggaacagatgccgcactggttaacggtctggcgtacgtcatgatcactgaaaacctggtggatcaggcattcctcgataaatattgcgttggctacgatgagaaaaccctgccagccagtgcgccgaaaaatggccactataaagcttatattctgggtgaagggccagatggcgtggctaaaacgccggaatgggcctcgcaaatcactggtgttccggcagacaaaatcatcaaattggctcgtgaaatcggtagtaccaaaccggcgtttatcagccagggatggggcccgcagcgtcacgctaacggtgaaatcgcaacccgtgctatctcgatgctggcgattctgaccggtaacgttggtattaacggaggcaacagcggcgcgcgtgaaggttcatacagcttaccgtttgtccgtatgccgaccttggaaaacccgatccagaccagcatttcgatgtttatgtggaccgatgccattgaacgtggcccggaaatgacggcgctgcgtgatggtgtacgcgggaaagataagctggatgtgccgatcaaaatgatctggaactatgccggtaactgcctgattaaccagcattctgaaatcaaccgtacccatgaaatccttcaggatgataagaagtgcgagctgattgtggttatcgactgccacatgacctcatcggcgaaatatgctgacatcctgctgcctgactgcaccgcttccgaacagatggactttgcgctggatgcatcctgcgggaatatgtcttacgtgattttcaacgatcaggtgattaaaccgcgctttgaatgtaagaccatctatgaaatgaccagcgaactggcaaaacgtcttggcgttgagcaacagtttactgaaggccgtacccaggaagagtggatgcggcatctgtatgcccagtcgcgggaagcgattcctgaactgccaacgtttgaagagttccgcaagcaggggatctttaaaaagcgcgacccacaagggcatcacgttgcttataaagccttccgtgaagatccgcaggcaaacccactgactacgccatcgggcaaaattgagatttattcgcaggcgctggctgacattgccgctacctgggaattgcctgaaggcgatgtgatcgatccactgccgatctacacgccgggctttgaaagttatcaggatccgctgaacaaacagtatccgctgcagcttacaggtttccactataaatctcgcgttcactcaacttacggcaacgttgatgtgctgaaagcggcttgccgtcaggaaatgtggatcaacccgcttgatgcccaaaaacgcggtatccacaacggcgataaagtcaggatctttaacgatcgtggtgaggttcatattgaggcgaaagtgacgccacgaatgatgccgggtgtggtcgcactgggtgaaggtgcctggtatgacccggatgcaaaacgtgtcgataagggtggttgtattaacgtactgaccactcaacgtccgtctcctctcgctaaggggaatccgtcacatacaaaccttgttcaggttgaaaaggtgtaaggagtaaccgatgacaacccagtatggattttttattgattccagccgttgcaccggttgcaaaacctgcgagctggcctgtaaagactacaaagatttgacgccagaagtcagcttccgccgcatttatgaatatgctggcggcgactggcaggaagataacggtgtctggcaccagaacgtgtttgcctactatctgtcgatttcatgtaaccactgcgaagatccggcttgtactaaagtctgcccgagcggtgcgatgcataaacgtgaagatggttttgttgtggtcgatgaagatgtgtgcattggctgccgctactgccatatggcttgcccgtatggcgcaccgcaatataacgaaacgaaaggccatatgaccaaatgcgatggttgttatgaccgtgttgcggagggtaaaaagccgatctgtgttgaatcttgtccgctgcgggcgctggatttcggccctatcgacgagctgcgtaaaaaacatggcgatctggcggccgttgcgccgttgccgcgagctcactttaccaaaccgaatattgtgatcaaacccaatgccaatagccgcccgaccggggataccactggctatctggcaaacccgaaggaggtgtgagatgggaagtggatggcatgaatggccgctgatgatcttcacggtcttcgggcaatgtgtagcaggtggttttatcgttctggctttggcgctgctcaaaggcgacctgcgagcagaagcccagcagcgtgttatcgcctgcatgtttggtttatgggtgctgatgggcattggctttatcgcctctatgctccatcttggttcaccaatgcgcgcttttaactcgctcaaccgggtaggggcttcagcactcagtaacgaaatcgccagcggttcgatcttttttgccgtaggcggcatcggctggttgctggcaatgctgaaaaagctgtcaccggcattgcgtacgctgtggctgatagtgacgatggttcttggcgtcatctttgtctggatgatggtgcgtgtgtataacagcattgataccgttccgacctggtacagcatctggacgccgatgggcttcttcctgacgatgtttatgggcggcccgttactgggttacctgttgttgagtctggctggcgtcgatggctgggcgatgcgtctgctgccagcaatttctgtactggcactggtagtgagtggcgtggtgtcagtgatgcagggcgcagagctggcgactattcatagttctgtgcagcaggccgcagcgctggtgccggactatggtgcgctgatgtcctggcggatcgtgcttttggccgttgccctgtgcttgtggattgcaccacagctaaaaggttatcagcctgcggttccgctactttctgtatcattcattctgcttctggcaggggaattaatcggtcgcggcgtattctatggtttgcatatgaccgtggggatggccgtcgcaagctaatcataacaaccggggtttcggccccggttctcttttatttctgcttcgttaacgtgtcataactggtcatcaaattacgataatcaggaatgtggttagagaacaacgtcgccagtccttcaatatcattacgccagtcgcgatgcagctcgcacgccacgccgaaccatgtcatcaattgcgcaccagcttgcgacaagcgatcccatgccgaatgccgggtaatttcattaaaggtccctgacgcgtcagtcacgacaaagacgtcaaacccttcttcaatggctgaaagcgccgggaatgccacgcaaacttcggttaccacaccggcaataattaactgttttttacctgtcgctttgacagcttttacaaaatcttcgttatcccaggcgttaatatttcccgggcgagcaatgtaaggtgtatcggggaattgtgctttcagttctggaactaatgggccgttaggaccggtttcaaaactggtggtaagaatagttggtaagttgaaatacttagccaggtcacccagcgccagcacgttatttttaaacttatcgggttcgatatcccgtacaagggaaagtaaaccagcctggtgatcaacaagcaaaacggcagcatcatttttatcaagacgaacatacggtttggtcatcctcttctcctttcgagagtcagtggtacgtctgaaatcgatcagacgcgatgcattgctctgaaagcatagacgggaaatatgagtttgctgtgaccatgaaatttttcgactgaacgaagcgtatgaaatttgtgttagttcaataaaaacaatcagatgagactaatcatctcttcagcattagcgttatgaatgagtaatataaatcgataataccgccgctgggatatcgcgtattttcacccattgacaatgtttttggcggtggcatgatgcgcatgaaatttgaacttcctcacggttttaattcatgtccacgtatacccagcctgtcatgcttttgctgtctggcctgcttttgttgactctggcgattgcggtgttaaatacactcgtgccgctttggctcgcccaggaacacatgtccacatggcaggtaggcgttgtcagctcatcctattttaccggcaaccttgtcggtacattgctgacagggtatgtcattaagcgcattggctttaaccgcagctattatctggcctccttcatttttgccgctggctgtgccggccttggcctgatgattggattctggagctggttggcttggcgttttgtcgcgggcgtcggctgtgccatgatttgggtggttgttgagagcgcgctgatgtgcagtgggacgtcacgtaaccgtgggcgtttgcttgctgcgtatatgatggtttattacgtgggaacgtttttaggccagttactggtcagcaaagtttcaaccgagctgatgtccgtattgccgtgggttacaggtttgacgttggcagggatcttaccgctgttgtttacgcgtgtgctgaatcagcaggctgaaaaccatgattcgacgtcaattacgtcaatgctaaaactccgtcaggcgcggcttggcgtgaatggctgcattatctcaggaatcgttctgggatctctatatggcctgatgccgctgtacctcaatcacaaaggggtgagcaatgccagcattggtttctggatggcggtactggtcagtgcgggtatccttggacaatggccgattggacgtctggcggataagtttggtcgactgctggtgttgcgtgttcaggtctttgtcgtcattctcggcagtatcgcgatgcttagccaggcggcgatggccccagcgttattcatcctcggtgccgctggctttacgctatatccggtggcgatggcatgggcttgcgagaaagttgaacatcatcaactggtggcgatgaaccaggccttactgttgagctatactgtgggaagtctgcttggcccgtcatttaccgctatgctaatgcagaatttctccgataatttattgtttatcatgatcgccagcgtatcgtttatctatttgctgatgctgctgcgcaacgccggtcatacgccgaaacccgttgctcacgtgtaaatgaattcaagcagagtgtgaacttactgtttcacactctgcttttttgtttcttctatctgacttgctttattccaaattttattcgtttaaaaataaaatgtgcagcaggttataattttgcatttcgctatttccgcacttcttatttgccgcgcataatccctcgttttaccgatgcccctttaattttggcgaaggatttgtctatggctgggaatgttcaggaaaaacagttgcgatggtacaacattgcgctgatgtcttttatcactgtctggggttttggcaacgttgttaataactatgccaaccaggggctggtggttgttttttcatgggtgtttatctttgcactctatttcacaccttatgcgctaattgttggtcagttaggctcgaccttcaaagatgggaagggcggggtcagtacctggattaaacacacgatgggacccggactggcttatctcgccgcgtggacctactgggtggtgcatattccctatctggcacaaaaaccccaggcaattctgattgcgctcggttgggcgatgaaaggcgacggttcgctaatcaaagaatattcagtcgtagcgttacaggggttaacgctggtgctgtttatcttctttatgtgggttgcttcacgcggtatgaaatcgctgaaaatcgtcggttctgtggcagggattgctatgtttgttatgtcactcctgtatgtggcgatggcggtaaccgcgcctgcaattactgaagtgcatattgcgaccacaaacattacctgggaaacgttcattcctcatatcgactttacctacattaccactatttcaatgctggttttcgcggttggcggagcagagaagatttctccttacgttaatcaaacgcgcaacccaggaaaagaatttccaaaagggatgttatgcctggcggtgatggttgcggtttgtgccattctgggctcgctggcgatggggatgatgtttgattcgcgtaatatcccggatgacttaatgaccaacggtcagtattacgcctttcagaagctgggcgagtattacaacatgggtaatactttaatggtgatttacgccattgcgaataccctgggacaagtagcggcgctggtattctcgattgatgccccgcttaaagtgctattaggtgatgctgacagcaaatatattccagccagtttatgtcgtaccaacgcttctggtacgcccgttaatggctattttctgaccctggtactggtggcgattctgattatgctgccgactctcggcattggtgatatgaacaatctctataaatggctgttgaaccttaattcggtagtgatgccgctgcgttatttatgggtatttgttgcatttattgcagtcgttcgcttggcgcagaaatataaaccagaatatgtctttattcgtaataagcctctggcaatgaccgtcgggatttggtgttttgcctttaccgcctttgcctgtttgacggggatcttcccgaaaatggaagccttcactgcagagtggaccttccagttggcgctgaatgttgcaacgccgtttgtgctggtaggattaggactgatattcccgctgctggcgcgtaaagcgaatagtaaataattattgtggtcggtgacgctgactctggcagatctgacccgtttttacataatcgagaaatgcgcgcaagccgcaggacatatactggcggtttggataatagatctggaagcctggacgctctgtgctccagtcttccagtacacattctaaacgaccagtatcaaggtactccttgatctgttcatagagcagatacccgataccagcacccatcaaaacggcctccagttcagcatcaacatcatccagaatgatatttcctgcgacagcaatttccagctcctttgcaaattgccagtggaaaggtttgccgctgggataacgaaaaacaacacattgatgattaagcagatcatgaggatggcggggtttgccatatcttgcaaagtactctggcgttgctgctacacataatttcactggcgggccgatcgccacgctgatcatatctttttcgacgatgcaactaagtcgaacgccagcgtcaaagccctgttggacgatatcgacaagagagtcgtcagttgtgagctcgactttaatatcaggatattcacgtgtgaaaccaaccagtaaagacattaaaaatatacgtgcagctacccgggcggcattgattttgagcgttcctgtcggtgtcagacgaaaatcattcatctcatctaacatgatctgaatttcgtcgaaagctgggcgcaatcgttcatagagattagaacccgcttccgttaacgatacgcttcgggttgtccgattgaataagcgaattttaagacgttgttccagtgttttaatactatggctaatggcggacgaggataagcctaactcatcgcccgctgcacgaaagctttgattacgggccacggcaaagaaagtggcaaagtcagacatattcatccgcattagtgaaaatccttcattaactcatcctgaatcatcacgtttacaggattatgccgcctgcgtaaagtgcgctccagaacttaacgtggaggtaaaattatgcagtctgaacgtatttatttggtatgggcccatcctcgtcatgattcattgaccgcacatattgctgatgcgatccatcagcgggcaatggagcggaaaatacaggtgacggaactcgatttatatcggcgtaatttcaacccagtgatgacgccggaagatgaaccagactggaagaatatggataaacgttattctccagaggttcatcagctttattcagagctgcttgaacatgacacgttagtggtggtttttcctctctggtggtacagcttcccggcaatgctaaaaggatatattgacagagtatggaataatgggctggcttatggagatgggcacaaattaccattcaataaagttcgttgggtggcgctggttggaggagacaaagaatcatttgtccagatgggctgggaaaaaaatataagcgattatttaaaaaatatgtgcagttatcttggtattgaagatgccgatgtcactttcttgtgtaatacagtggtattcgatggggaagaacttcacgcgagctattatcagtcgttattatctcaggtacgggatatggtagatgcactataagatgtgttaaaaacgctgtagcagaatgaagcgcggaataaaaaagcggcaactcaataaagttgccgctttacggggaaattagaacattaccttatgaccgtactgctcaagaatgcctttcacgcgttccatggtctctttcttcggtggtttaacaccgtcgagtttgtactcttcacccattgccacccatttgtgtttgcccagctcgtggtaggggagaagctcgattttctcaacgttgcccatatcacgggtaaattcaccgaggcgatgcgctgaatcgtcatcgtcagaccagcctgggacaacaacgtagcggatccacaccttcacatttttgttcgccagatatttagcgaactccagcgtgcggtggttggaaactccaaccagattttggtggatctcgtcgttcatctgtttgagatcgagcattaccaggtcggttacttccagcagttcatcaatcaccggatcgtaacgacgaacaaaaccgttggtgtccagacaggtatgaatgccttcttttttgcaggcgcggaaccagtcacgaacaaactcagcttgcaggattgcttcaccgccggatgcggtaacgccgccgccggaagcgttcataaagtggcgataggtcaccacttccttcatcaaatcttcaacggtaacttctttaccgccatgcgtgtcccaggtgtcgcggttatgacaatacaggcagcgcatcaggcagccctggaaaaaggtgataaagcgaatacctgggccgtctacggttccacaggattcaaaggagtgaatgcgaccaataactgacattgcggtgtttctccagatgtggcccatctgaggccgtgttggtgcgcagctcgaaggctacgtcgagtctgttttggcagtcaccttaaagtatagatagctgacaaaaaaggctctcgcgctaaaaaaggccccactttcgtggagcctttattgtacgctttttactgtacgatttcagtcaaatctaattacatagattgagtgaaggtacgagtaataacgtcctgctgctgttctttagtcagcgagttgaaacgtactgcgtagccagatacacggatggtcagctgcggatatttttccgggttttccatcgcgtcgagcagcatttcacggttcatcacgttaacgttcaggtgctgaccaccttcgatggatgcttcgtggtggaagtaaccatccatcagaccagccaggttggtcttacgaacttcgtcgtctttacccagtgcgttcggaacgatagagaaggtgtaggagataccatctttagcgtaagcaaacggcagtttagcaacggaagtcagagaggctactgcacctttctggtcacgaccgtgcatcgggttagcacccggtccgaacggcgcgccagcacgacgaccgtctggggtgttacccgttttcttaccatacacaacgttagaagtgatggtcagaacagactgagtcgggatagcgtcacggtaggtgtgcagtttctgaattttcttcatgaaacgttctaccaggtcaacagccaggtcatctacacgcggatcattgttaccaaactgcgggtattcgccttcgatttcgaagtcgatagccagaccgtcttcgtcacgaatcggtttaactttcgcatatttgattgcagacagggagtcagcagcaacggacagaccagcgataccacacgccatggtgcggataacgtcacggtcgtgcagcgccatcagagaggcttcgtagctgtacttgtcgtgcatgtagtggatgatgttcagtgcagtgatgtactgtttagccagccagtccatgaagtgatccatgcgctccatcacttcatcatagttcaggacatcgcctttgatcggttcagacttcggaccaacctgcattttcagtttttcgtcaacgccgccgttgattgcgtacagcatggttttcgccaggtttgcacgcgcaccgaagaactgcatttgtttaccaacgatcatcgggcttacgcagcaagcaatagcgtagtcatcgttgttgaagtccggacgcatcaggtcatcgttctcatactgcagagaagaggtgtcgatggacactttagcggcgaatttcttgaagttcagcggcagtttttcagaccacagaatggtcatgttcggttccggagacggacccatggtgtacagggtgttcaggaaacggaagctgtttttggtaaccagggtacgaccgtcgaggcccataccaccgatagattcggttgcccagatcgggtcgccagagaacagttcatcgtattccggagtacgcaggaagcgaaccatacgcagtttcatgaccaggtggtcaaccatttcctgcgcttcttgttcggtgatcttgccagctttcaggtcacgttcgatgtacacatccaggaaggtggaggtacgaccgaaggacattgcagcaccgttctgagacttaacagcagccaggtagccgaagtaagtccactggatagcttcctgagcgttggtagccggaccagagatgtcgtagccgtatttcgcagccatttctttcatctgacccagagcgcggtgctgttcagcgatttcttcgcgcagacggatagtctgttccaggtttacgccgttttccagatcagcctgcagagaagtgaactgtgccagtttgtctttcatcaggtagtcgataccgtacagcgcaacgcgacggtagtcaccgatgatacggccacggccatatgcatctggcagaccggtcagaacaccagatttacggcaacgcaggatgtccggagtgtaaacgtcgaacacgccctggttgtgagttttacggtattcagtgaagatttttttgatcatcggatccagttcgcggttgtacgctttgcaggaaccttcgatcattttgataccaccgaacgggataagagcacgtttcagcggagcttcagtctgcagaccaacgattttctcaagctgcttgttgatgtagccagcgtcgtgagaggtgatggtggaagcaacagcggtgtcaaagtcaactggcgcgtgagtgcggttttccagtttaacgccttccattactttgtcccacagggtggtggtcgcttcagtagcgccagccaggaaggactcgtcaccctcgtacggagtgtagtttttctgaatgaagtcacggacgtttacttcattctgccagtcacctttggtaaaaccttcccaggctgtggctaacttttcattaagctcggacatgtaacacctaccttcttaagtggattttttatttactgcgtacttcgacaaccattaatggtggtcgttttcacgcaggtaaatgacccagtatgtcaacccaaccaacaaaccaccaccgataatgttgccgatcgtaaccggaatcaggttatcagtgatgaaattcatcacggtcaggtgagaaaaattttccggtgcagaaccgactgcggtccaaaattccggggatgcgaagtcgcggattacaatacccatcgggatcataaacatgtttgcgatactgtgctcaaaaccgctggcaacaaacatcgcgaccggcagcaccataatgaacgctttgtccatcaggctgcggccagaataactcatccatactgccagacataccatcaggtttgccaggataccaagacagacggcctcaataaaagtatggtgcactttgtggtcggcggtttgtaggacgtttagtccccattgaccatttgcggtcatatactcgccggaaagccacattaaaagtacaaacagcagtgcgccgaccaggttgccaaaatagacatttagccagtttttcgccaactgaccccaggtgatgcgcccactcgccttagcaacaacaatcaacacggtggaagtaaagagatcggctccgcagacaacacaaagaatcagccccagagagaagcaaatgccgccaaccagttttgccatgccgaagggcattgtgcctgtgccagtggttgctgtgatatagaagacgaatgcgattgagatgaaaacaccggcggtaatcgccagatagaaagtcttaagcggatgtttcgttgctttatagacacccgcctcttcggccactttggccattgcagcaggaagtaaaagatcaaaagggttgtcagctttcacactaactctctctttattaagtcggcgacgagatactaacaaagcattatagatgagaaattgatatagatcatatctcgcctggcttataggcccgtaactcgcatggtttttatgcaaatacggagtaaatatttgattatccaaataaaaataaattttaaaaattaacaaatgagttgaattttttccgcatcctccgctaaaacagttaattaaaagggagcatcaggcgaataaagtaacaatatcgatcgtatttattaaatacaaattaccgatatttaaccttataattacaattattttattaatgcaaatatatgtaaagcggggcattaaaaaaacgccccgtaatataactcagactaatcattaagcctacattgcgtaggctatttgattttattttgcccagaatgctgctttggcgcgctgcagcttttcgtaggccttcaacaacgactgatgtgcagcaaacgcgtgcagatcgctatctaccggttgcaggccgtaaaacgccgcttcgccgctcattgccgcactggcggcttctacggcatctgcgccgtacatgcgaacaaacgcattcagatattgcagcggctggcgatcttcttcctgtgccagtaataacaacgtttgcaggcagcgataatagttggcgcgttccggactaaatactgatgagttaaactccatcgtccattcggtccagaccagagcctgttccagatcgccaccagccagcgccagcatggcttttaattcaccgatacgcagggtgtaccaaccgttatccgacccggtcgccagacccaacagctcacgcacgcgggtaaagtcatcaaaaccttcttcatccagttgctcgatgaggttcaggtaatcttctttttcccactcgctgcctggtagcgaaagaatcgtttcacgtaaatggctgcccatactgttattcgcgagccacagatcttcagccggataaatatcggacatgccaggcacgataatacggcaagcataaacgcccagatgctcgtaatcggcaatataaacttctttatcttctttgttgaagatagccatcagtgtggcgaactcttcttccgtggtgccggagaaattccagtccacaaacggataatcggcatcctgcttgaacaggtcccaggagattaaaccgctggaatcgataaagtgcgtttcgaggttggtatgttcagcgacttcttcatcatcgaaggttggcggagtaaacacatccaaatctttcaggccacgaccttgcagcagctcggtcacggtacgttccagtgctacgccaaaatcaggatgcgcaccgaaagaggcaaagcaggtaccgttagcaggattgaacagtaccacgcaaatcaccggatactggccgccaagcgaaccgtcataagcgaagattgggaaaccctccgcttccagcgtttcgatggcttcaactactgctgggtaacgcgccagcacgtctgccgggatctctggcaggctgatgctttcagcaataatgcggtttttcacgtagcgttcgaaaacttcagacaatccctgaacgcgtgcttcgttgcgggtattacctgcggacataccgttggagacgtacaggttaccaatgatattcatcggaatataaacggtctgattgtcggactgacgcgtaaacggcaggccgcaaataccacgatcttcgttaccggattgtaggtcaatcagcatgctgccggtcagttcattctccggatcataaaacgcgcgcagacggtcatcgagcagcccttctggcacatcgtcattttcggtcagtgggaaccatttttcgttgggataatgcacgaacggaccgttggcgatggtttcgcccagccagaagtccgcaaaaaagtagttggttgagagacgctcgaaatattcaccgagtgcagaagccagcgccgctttcttggttgcgcctttaccgttggtaaaacacagtgcgcactctttgtcgcgaatatgtacagaccagacgttaggcacgggattcagccaggaggcctcttcaatctgaaagccgaggtctgaaagtttttgctggaagcgagcgatggaatcttccagagcggcatctttgccggggataaatgtttgcgtcatgaaaatcactttagtcgtacggaaagcgcgcaataatacgggttttatctcaaaggcgctatcaccgccgccatgccgatgaactgttgactatgcttttagcggataaaccacgttaagagcataaaaatgaaggcgttcgatctccaccgtatggcatttgataaagtgccttttgatttccttggcgaagttgcactacgtagtctttatacctttgtactggtctttttgttcctcaaaatgaccggaagacgcggtgtgcggcagatgtcgctgtttgaagttttaatcattctgacgctgggatcagcggcgggagatgtggcgttttatgatgatgtgccgatggtcccggtacttatcgtctttattactctggcgttgttataccgcctggtaatgtggttgatggcgcacagtgaaaaactggaagatcttctggaaggcaagccagttgtcattattgaagatggcgagctggcctggtcgaaactcaataactccaacatgacggaatttgagttctttatggagctacgattgcgtggcgtggagcagctggggcaggtacgtctggcgattctcgaaaccaacgggcaaatcagtgtctatttctttgaagatgacaaggtgaaaccgggtttacttattttacccagtgattgtacgcagcgttacaaagtggtgccggagtcggcggactatgcctgtattcgttgtagtgaaatcattcatatgaaagcgggggaaaaacaattatgtccgcgctgtgcaaatccagaatggacgaaggcaagtcgggcaaaacgggtgacctgacagtaaaaacatcggctttttgctaataatccgagagattcttttgtgtgatgcaagccacatttttgccctcaacggttttactcattgcgatgtgtgtcactgaatgataaaaccgatagccacaggaataatgtattacctgtggtcgcaatcgattgaccgcgggttaatagcaacgcaacgtggtgaggggaaatggctcaaatcttcaattttagttctggtccggcaatgctaccggcagaggtgcttaaacaggctcaacaggaactgcgcgactggaacggtcttggtacgtcggtgatggaagtgagtcaccgtggcaaagagttcattcaggttgcagaggaagccgagaaggattttcgcgatcttcttaatgtcccctccaactacaaggtattattctgccatggcggtggtcgcggtcagtttgctgcggtaccgctgaatattctcggtgataaaaccaccgcagattatgttgatgccggttactgggcggcaagtgccattaaagaagcgaaaaaatactgcacgcctaatgtctttgacgccaaagtgactgttgatggtctgcgcgcggttaagccaatgcgtgaatggcaactctctgataatgctgcttatatgcattattgcccgaatgaaaccatcgatggtatcgccatcgacgaaacgccagacttcggcgcagatgtggtggtcgccgctgacttctcttcaaccattctttcccgtccgattgacgtcagccgttatggtgtaatttacgctggcgcgcagaaaaatatcggcccggctggcctgacaatcgtcatcgttcgtgaagatttgctgggcaaagcgaatatcgcgtgtccgtcgattctggattattccatcctcaacgataacggctccatgtttaacacgccgccgacatttgcctggtatctatctggtctggtctttaaatggctgaaagcgaacggcggtgtagctgaaatggataaaatcaatcagcaaaaagcagaactgctatatggggtgattgataacagcgatttctaccgcaatgacgtggcgaaagctaaccgttcgcggatgaacgtgccgttccagttggcggacagtgcgcttgacaaattgttccttgaagagtcttttgctgctggccttcatgcactgaaaggtcaccgtgtggtcggcggaatgcgcgcttctatttataacgccatgccgctggaaggcgttaaagcgctgacagacttcatggttgagttcgaacgccgtcacggttaatgccgaaattttgcttaatccccacagccagcctgtggggtttttatttctgttgtagagagttgagttcatggaatccctgacgttacaacccatcgctcgtgtcgatggcactattaatctgcccggttccaagagcgtttctaaccgcgctttattgctggcggcattagcacacggcaaaacagtattaaccaatctgctggatagcgatgacgtgcgccatatgctgaatgcattaacagcgttaggggtaagctatacgctttcagccgatcgtacgcgttgcgaaattatcggtaacggcggtccattacacgcagaaggtgccctggagttgttcctcggtaacgccggaacggcaatgcgtccgctggcggcagctctttgtctgggtagcaatgatattgtgctgaccggtgagccgcgtatgaaagaacgcccgattggtcatctggtggatgcgctgcgcctgggcggggcgaagatcacttacctggaacaagaaaattatccgccgttgcgtttacagggcggctttactggcggcaacgttgacgttgatggctccgtttccagccaattcctcaccgcactgttaatgactgcgcctcttgcgccggaagatacggtgattcgtattaaaggcgatctggtttctaaaccttatatcgacatcacactcaatctgatgaagacgtttggtgttgaaattgaaaatcagcactatcaacaatttgtcgtaaaaggcgggcagtcttatcagtctccgggtacttatttggtcgaaggcgatgcatcttcggcttcttactttctggcagcagcagcaatcaaaggcggcactgtaaaagtgaccggtattggacgtaacagtatgcagggtgatattcgctttgctgatgtgctggaaaaaatgggcgcgaccatttgctggggcgatgattatatttcctgcacgcgtggtgaactgaacgctattgatatggatatgaaccatattcctgatgcggcgatgaccattgccacggcggcgttatttgcaaaaggcaccaccacgctgcgcaatatctataactggcgtgttaaagagaccgatcgcctgtttgcgatggcaacagaactgcgtaaagtcggcgcggaagtggaagaggggcacgattacattcgtatcactcctccggaaaaactgaactttgccgagatcgcgacatacaatgatcaccggatggcgatgtgtttctcgctggtggcgttgtcagatacaccagtgacgattcttgatcccaaatgcacggccaaaacatttccggattatttcgagcagctggcgcggattagccaggcagcctgaatgaacaacgggcaataaatagccaaatctttctttatcaaaacgtcggcacattgtcggcgttttttttcggaccttgtgagtcattttgattaatggtagcgtcgcttgtcaatgtaagttgttgatacataatatttatatatgattaatcaacggatgattcacatgaagaatactaaattactgctggcgattgcgacctctgcagcattactgacagggtgtcaaaatacccacggtattgataccaatatggctatcagctccggtttaaatgcctataaagcagcaacattaagcgatgccgatgcaaaagcgattgccaatcagggctgtgccgaaatggacagcggcaatcaagtcgcaagtaaatccagcaagtacggtaaacgtctggcaaaaatcgccaaagcattgggtaacaatattaatggcacgccggtcaactataaggtttatatgaccagcgacgtcaacgcatgggcgatggcgaacggctgtgttcgtgtctacagtggcctgatggacatgatgaatgacaacgaaattgaaggcgttctgggccatgaactgggccacgtcgcgttgggtcactcgctggctgaaatgaaagcttcttatgcgatcgttgccgcacgcgatgccatttcagctaccagcggtgtggcttcccagctttcccgctcacaattaggtgatatcgcagaaggcgctatcaatgctaaatactcccgtgataaagagtccgaagcagatgatttctcctttgatctgttgaagaaacgtggcatcagcacccaggggctggttggcagctttgaaacactggctagcctggatggcggtcgcacccagtccatgtttgactctcacccaccatcaacagagcgtgcgcaacacatccgtgatcgtatcgcctctggtaagtaaatcattgtcatctttcgggctggtcttctgccagcccgctataattgcgcaataaatccccatctgaatacagacaaaactggtttttgcacacaacgttaacgatttgtggcgtcggcgcgtataatgcgcgcggttatgttaacggtacgcctgttttaaggagataaagatgacggcaattgccccggttattaccattgatggcccaagcggtgcagggaaaggcaccttgtgtaaggctatggcggaagcgttgcaatggcatctgctggactcgggtgcaatttatcgcgtactggcattggcggcattacatcaccatgttgatgttgcgtcggaagatgcgctggtaccgctggcatcccatctggatgtacgttttgtgtcgaccaatggcaatctggaagtgatcctcgaaggggaagatgtcagcggcgaaattcgtactcaggaagtggcgaatgcagcttcacaagtcgcggcattcccacgcgttcgtgaagcattattgcgtcgccaacgcgcgtttcgcgaattaccaggtctgattgccgatggccgcgacatgggaacggtggtattccctgatgcaccagtgaaaattttccttgacgcctcctcggaagaacgtgcgcatcgccgcatgctacagttgcaggagaagggctttagtgttaactttgagcgccttttggccgagatcaaagaacgcgacgaccgcgatcgtaaccgagcggtagcgccactggttccggcagccgatgctttagtgttggattccaccaccttaagcattgagcaagtgattgaaaaagcgctacaatacgcgcgccagaaattggctctcgcataagcgaccgaatttgcagtacccccgttgcaatggaatgacagcgggtatgttaaacaaccccatccggcatggagccaggtggacgttaaatataaacctgaagattaaacatgactgaatcttttgctcaactctttgaagagtccttaaaagaaatcgaaacccgcccgggttctatcgttcgtggcgttgttgttgctatcgacaaagacgtagtactggttgacgctggtctgaaatctgagtccgccatcccggctgagcagttcaaaaacgcccagggcgagctggaaatccaggtaggtgacgaagttgacgttgctctggacgcagtagaagacggcttcggtgaaactctgctgtcccgtgagaaagctaaacgtcacgaagcctggatcacgctggaaaaagcttacgaagatgctgaaactgttaccggtgttatcaacggcaaagttaagggcggcttcactgttgagctgaacggtattcgtgcgttcctgccaggttctctggtagacgttcgtccggtgcgtgacactctgcacctggaaggcaaagagcttgaatttaaagtaatcaagctggatcagaagcgcaacaacgttgttgtttctcgtcgtgccgttatcgaatccgaaaacagcgcagagcgcgatcagctgctggaaaacctgcaggaaggcatggaagttaaaggtatcgttaagaacctcactgactacggtgcattcgttgatctgggcggcgttgacggcctgctgcacatcactgacatggcctggaaacgcgttaagcatccgagcgaaatcgtcaacgtgggcgacgaaatcactgttaaagtgctgaagttcgaccgcgaacgtacccgtgtatccctgggcctgaaacagctgggcgaagatccgtgggtagctatcgctaaacgttatccggaaggtaccaaactgactggtcgcgtgaccaacctgaccgactacggctgcttcgttgaaatcgaagaaggcgttgaaggcctggtacacgtttccgaaatggactggaccaacaaaaacatccacccgtccaaagttgttaacgttggcgatgtagtggaagttatggttctggatatcgacgaagaacgtcgtcgtatctccctgggtctgaaacagtgcaaagctaacccgtggcagcagttcgcggaaacccacaacaagggcgaccgtgttgaaggtaaaatcaagtctatcactgacttcggtatcttcatcggcttggacggcggcatcgacggcctggttcacctgtctgacatctcctggaacgttgcaggcgaagaagcagttcgtgaatacaaaaaaggcgacgaaatcgctgcagttgttctgcaggttgacgcagaacgtgaacgtatctccctgggcgttaaacagctcgcagaagatccgttcaacaactgggttgctctgaacaagaaaggcgctatcgtaaccggtaaagtaactgcagttgacgctaaaggcgcaaccgtagaactggctgacggcgttgaaggttacctgcgtgcttctgaagcatcccgtgaccgcgttgaagacgctaccctggttctgagcgttggcgacgaagttgaagctaaattcaccggcgttgatcgtaaaaaccgcgcaatcagcctgtctgttcgtgcgaaagacgaagctgacgagaaagatgcaatcgcaactgttaacaaacaggaagatgcaaacttctccaacaacgcaatggctgaagctttcaaagcagctaaaggcgagtaattctctgactcttcgggatttttattccgaagtttgttgagtttacttgacagattgcaggtttcgtcctgtaatcaagcactaagggcggctacggccgcccttaatcaatgcagcaacagcagccgcttaatttgcctttaaggaaccggaggaatcatgaccaagtcagaattgatagaaagacttgccacccagcaatcgcacattcccgccaagacggttgaagatgcagtaaaagagatgctggagcatatggcctcgactcttgcgcagggcgagcgtattgaaatccgcggtttcggcagtttctctttgcactaccgcgcaccacgtaccggacgtaatccgaagactggcgataaagtagaactggaaggaaaatacgttcctcactttaaacctggtaaagaactgcgcgatcgcgccaatatttacggttaagttttttactcaaacttgaacgagagaaaagcacctgtcgggtgcttttttcatttctctaatctggaactggaagctgcctcgcagagttttgaacagttttcaccctttcgttaaattcttctgaatatgcctcggggaacgcaaaattcccaccagacaaccgctcaacaaagttgcacactttccataaacagggaggggtgcatgaaaataacgacagtcggtgtatgcataattagcggaatttttccgttgctgattttgccccaattgcctgggacattaacccttgcgtttctgactctcttcgcctgcgtactggcatttatccctgttaaaaccgtccgttatatcgcgctgacgttgctgtttttcgtttggggcatattatcagcaaagcaaattttgtgggcaggagaaaccttaactggcgcgacgcaggatgcaattgttgagatcactgcaactgacggcatgaccactcattacggtcaaattactcatctacaaggtcgacgtatattccctgcgtcaggtctcgtgatgtatggcgaatatcttccgcaagcggtttgtgctggacaacaatggtcaatgaaactcaaagttcgtgcagttcatggccaacttaatgatggcggctttgatagccagcgttatgccattgcccagcatcagccgctcaccggccgttttctgcaggcaagtgtcattgaaccgaattgtagcctgcgtgcacagtatctggcgtcactacaaacaacgctgcaaccctatccgtggaatgcggttattcttggtttaggtatgggggaacggttatccgtccccaaagaaatcaaaaatatcatgcgcgatactggaacggcgcatttaatggcgatatcgggattgcacatcgcttttgcggcgttgctggctgccggactcattcgcagtggacaaatttttctgcctgggcgctggatccactggcaaataccattaattggcggaatctgctgtgctgctttttatgcctggttgacgggaatgcaacctcctgcattgcgtaccatggtggcgcttgctacgtggggaatgcttaagttaagtgggcgacagtggagtggctgggatgtatggatatgttgtctggcggcaattttgctgatggatcctgttgccattctctcgcaaagtttatggctctctgccgctgcggtcgcggcattgatattttggtatcagtggtttccctgtcctgagtggcaactgccgccggtattgcgtgcagttgtttccctcatccatctgcaactgggaatcacacttctgcttatgcccgtgcaaatcgtcatatttcatggcattagtctgacctcgtttattgcaaatctattagcaattcccttggtgacatttatcacggttccgttgatcctcgccgcgatggttgtgcatttaagcgggccgttaatcctggagcaagggttatggtttcttgccgaccggtctttggctttacttttctgggggttaaagagtttgccggaagggtggatcaacattgctgaatgttggcaatggctatcattttccccatggttcttactggtggtatggcgattaaacgcctggcgaacgttgccagcaatgtgtgtggctggaggcttgctgatgtgctggccgctgtggcaaaaacctcgacctgacgagtggcagctgtacatgcttgatgtcgggcaagggctggcaatggtgatagccagaaacggcaaagcgattctctatgacacaggactggcctggcctgaaggggatagtgggcaacaactgattatcccctggctccactggcataatcttgaaccggaaggcgttattctgagccatgaacatctggatcaccggggagggctggattcaatattgcatatatggccgatgttatggatcagaagtccgttaaactgggaacatcatcagccctgtgtgcgtggcgaagcgtggcaatggcaaggattgcgtttcagcgcgcactggcctttacaaggtagcaacgataaaggaaataaccattcctgtgtggttaaggttgatgacgggacgaatagcattcttctaaccggtgatattgaagccccagctgaacaaaagatgctaagccgttactggcagcaagtgcaggcaacattgcttcaggtacctcaccatggcagtaatacctcatcatcgttgccattaattcagcgagtgaatggaaaagtggcactcgcatcggcatcgcgctataacgcatggcgactgccctctaacaaagttaagcatcgctatcaactgcaaggatatcaatggattgatactccacatcaaggtcaaacaacggtcaatttttcagcgcaaggctggcggattagcagcctcagggagcaaattttacctcgttggtatcatcagtggtttggcgtgccagtggataacgggtagaatatgcggctatttcaacaaatgctggttttttgaatgcataacgacaaagatctctctacgtggcagacattccgccgactgtggccaaccattgcgcctttcaaagcgggtctgatcgtggcgggcgtagcgttaatcctcaacgcagccagcgataccttcatgttatcgctccttaagccacttcttgatgatggctttggtaaaacagatcgctccgtgctggtgtggatgccgctggtggtgatcgggctgatgattttacgtggtatcaccagctatgtctccagctactgtatctcctgggtatcaggaaaggtggtaatgaccatgcgtcgccgcctgtttggtcacatgatgggaatgccagtttcattctttgacaaacagtcaacgggtacgctgttgtcacgtattacctacgattccgaacaggttgcttcttcttcttccggcgcactgattactgttgtgcgtgaaggtgcgtcgatcatcggcctgttcatcatgatgttctattacagttggcaactgtcgatcattttgattgtgctggcaccgattgtttcgattgcgattcgcgttgtatcgaagcgttttcgcaacatcagtaaaaacatgcagaacaccatggggcaggtgaccaccagcgcagaacaaatgctgaagggccacaaagaagtattgattttcggtggtcaggaagtggaaacgaaacgctttgataaagtcagcaaccgaatgcgtcttcaggggatgaaaatggtttcagcctcttccatctctgatccgatcattcagctgatcgcctctttggcgctggcgtttgttctgtatgcggcgagcttcccaagtgtcatggatagcctgactgccggtacgattaccgttgttttctcttcaatgattgcactgatgcgtccgctgaaatcgctgaccaacgttaacgcccagttccagcgcggtatggcggcttgtcagacgctgtttaccattctggacagtgagcaggagaaagatgaaggtaagcgcgtgatcgagcgtgcgactggcgacgtggaattccgcaatgtcacctttacttatccgggacgtgacgtacctgcattgcgtaacatcaacctgaaaattccggcagggaagacggttgctctggttggacgctctggttcgggtaaatcaaccatcgccagcctgatcacgcgtttttacgatattgatgaaggcgaaatcctgatggatggtcacgatctgcgcgagtataccctggcgtcgttacgtaaccaggttgctctggtgtcgcagaatgtccatctgtttaacgatacggttgctaacaacattgcttacgcacggactgaacagtacagccgtgagcaaattgaagaagcggcgcgtatggcctacgccatggacttcatcaataagatggataacggtctcgatacagtgattggtgaaaacggcgtgctgctctctggcggtcagcgtcagcgtattgctatcgctcgagccttgttgcgtgatagcccgattctgattctggacgaagctacctcggctctggataccgaatccgaacgtgcgattcaggcggcactggatgagttgcagaaaaaccgtacctctctggtgattgcccaccgcttgtctaccattgaaaaggcagacgaaatcgtggtcgtcgaggatggtgtcattgtggaacgcggtacgcataacgatttgcttgagcaccgcggcgtttacgcgcaacttcacaaaatgcagtttggccaatgatcgaaaaaatctggtctggtgaatcccctttgtggcggctattgctgccactctcctggttgtatggcctggtgagtggcgcgatccgtctttgctataaactaaaactgaagcgcgcctggcgtgcccccgtaccggttgtcgtggttggtaatctcaccgcaggcggcaacggaaaaaccccggtcgttgtctggctggtggaacagttgcaacagcgcggtattcgcgtgggggtcgtatcgcggggatatggtggtaaggctgaatcttatccgctgttattgtcggcagataccacaacagcacaggcgggtgatgaacctgtgttgatttatcaacgcactgatgcgcctgttgcggtttctcccgttcgttctgatgcggtaaaagccattctggcgcaacaccctgatgtgcagatcatcgtaaccgacgacggtttacagcattaccgtctggcgcgtgatgtggaaattgtcgttattgatggtgtgcgtcgctttggcaatggctggtggttgccggcggggccaatgcgtgagcgagcggggcgcttaaagtcggttgatgcggtaatcgtcaacggcggtgtccctcgcagcggtgaaatccccatgcatctgctgccgggtcaggcggtgaatttacgtaccggtacgcgttgtgacgttgctcagcttgaacatgtagtggcgatggcggggattgggcatccgccgcgcttttttgccacgctgaagatgtgtggcgtacaaccggaaaaatgtgtaccgctggccgatcatcagtctttgaaccatgcggatgtcagtgcgttggtaagcgccgggcaaacgctggtaatgactgaaaaagatgcggtgaaatgccgggcctttgcagaagaaaattggtggtatttgcctgtagacgcacagctttcaggtgatgaaccagcgaaactgcttacgcaactaaccttgctggcttctggcaactagttacgccgcggcagcgttcgattgatggagtcatgaatgtcgctgccgcacctctcccttgctgatgcgcgtaatcttcaccttgccgcacaaggcctgttaaacaaaccccgccgtcgagcgtcgttggaggatattccggcaacgatctcccgcatgtccttgctgcaaatcgataccatcaatattgttgcccgtagtccatatctggtgcttttcagtcgtctgggaaattatcctgcccagtggctggatgagtctctggcgcgtggcgaattaatggaatactgggcgcatgaagcctgctttatgccgcgtagcgactttcgtcttattcgccaccgcatgctggcacctgaaaaaatgggctggaaatacaaagacgcctggatgcaggaacatgaggcggaaattgcacagttaattcagcatattcatgataaggggccggtacgttcagccgattttgagcatcctcgtaaaggtgcaagcggctggtgggaatggaagccgcataaacggcatctggaaggtttatttactgccggaaaggtgatggtgattgaacggcgcaacttccagcgcgtttatgatttaacccaccgtgtcatgcctgactgggatgatgagcgcgatctcgtttcgcaaacagaagcagaaatcatcatgctggataacagtgcgcgtagcctgggaatattccgcgaacagtggctggcagattactatcggctgaaacgtccggcactggcggcgtggcgcgaagcgagggctgaacagcagcaaatcattgctgtgcatgttgaaaaattgggcaatctttggctgcatgatgatttgctgccgctactcgagcgagcgctggccggaaagctcactgcaacgcacagcgcggtactttcgccttttgatcctgttgtctgggatcgcaaacgcgcagagcagctttttgattttagctaccggctggagtgctataccccagcgccgaaacgccagtatggctattttgttctgccgttattacatcgtgggcaattagttgggcgaatggatgccaaaatgcatcgccagacaggcatccttgaagttatctctctgtggttacaggaaggtattaaaccaacgacaacgctgcaaaaagggctacgtcaggcgattactgatttcgctaactggcagcaggcaacgcgggtgacattaggatgctgcccgcaaggcctctttactgattgccgcaccggctgggaaatagaccccgtcgcataaatgattatgataagatttatgcattcataacccgatccatctggaggaactatggatcatcgtctgcttgaaatcattgcctgcccggtttgcaacggaaaactttggtataaccaggaaaaacaagagcttatttgcaaactggacaacctcgctttcccgctgcgtgatggcattccagtgttgctggaaacggaagcccgcgtgctgactgctgatgagagtaaatcatgagttttgtggtcattattcccgcgcgctacgcgtccacgcgtctgcccggtaaaccattggttgatattaacggcaaacccatgattgttcatgttcttgaacgcgcgcgtgaatcaggtgccgagcgcatcatcgtggcaaccgatcatgaggatgttgcccgcgccgttgaagccgctggcggtgaagtatgtatgacgcgcgccgatcatcagtcaggaacagaacgtctggcggaagttgtcgaaaaatgcgcattcagcgacgacacggtgatcgttaatgtgcagggtgatgaaccgatgatccctgcgacaatcattcgtcaggttgctgataacctcgctcagcgtcaggtgggtatggcgactctggcggtgccaatccacaatgcggaagaagcgtttaacccgaatgcggtgaaagtggttctcgacgctgaagggtatgcactgtacttctctcgcgccaccattccttgggatcgtgatcgttttgcagaaggccttgaaaccgttggcgataacttcctgcgtcatcttggtatttatggctaccgtgcaggctttatccgtcgttacgtcaactggcagccaagtccgttagaacacatcgaaatgttagagcagcttcgtgttctgtggtacggcgaaaaaatccatgttgctgttgctcaggaagttcctggcacaggtgtggatacccctgaagatcttgagcgcgttcgcgctgaaatgcgctaatttcacttcacgacacttcagccaattttgggaggagtgtcgtaccgttacgattttcctcaatttttcttttcaacaattgatctcattcaggtgacatcttttatattggcgctcattatgaaagcagtagcttttatgagggtaatctgaatggaacagctgcgtgccgaattaagccatttactgggcgaaaaactcagtcgtattgagtgcgtcaatgaaaaagcggatacggcgttgtgggctttgtatgacagccagggaaacccaatgccgttaatggcaagaagctttagtacgcccggaaaagcccgacaactggcatggaaaaccaccatgctggcaagaagtgggactgtccgtatgccgactatttatggtgtgatgacgcatgaagaacaccccggccccgatgtcctgctactggagcggatgcgtggtgtttcggtggaggcaccagcccgaacaccagaacgctgggaacaactcaaagaccaaatcgttgaagccttactggcctggcaccgtcaggacagtcgcggttgcgtcggcgcggtcgacaatactcaggaaaatttctggccctcatggtaccggcaacatgttgaagtgctatggaccacgctcaatcagttcaataacaccggtctgacgatgcaggataagcggatcctgtttcgcactcgcgaatgtctcccggcattatttgaaggctttaacgacaattgtgtgctgattcacggtaacttctgtttacgcagcatgttgaaagattcgcgcagcgatcagttactggcgatggtcgggccgggactaatgctttgggcaccgcgagaatacgaactgttccgactaatggataattctctggcggaagatttgctctggagttacctgcaacgcgcgccagtggcggagtcgttcatctggcggcgttggttgtatgtgttatgggatgaagttgcgcaactggttaataccggacgatttagtcggcgcaacttcgatctggcatcaaaatcactcttgccgtggctcgcctgacgaaccttttagccactgccagatacggccaagcgtttcatagccaacacgatcgctatgcatcaaccagaccggagaagggattgcccgttcccacgggttaagcggcgagtcgatggccaactgattcgccggggctggtagcggatttaacccttcctgctgaaaaaagatcatcgcccgcggcagatgtgatgcggaggtcaccagcaggaaaggggcgtcaccaatcgcctgtttcactgctgcagcttcttcttcggtatcttttggcaaatccagggtgataatttgctcgcgcggcacgcccagcgattgcgcaactctggcacctacttccgctgtactcaccgtattggtttttgctacgcctcccgtgaagatcagttttgatcccggattttcgcgccataagcgaataccttcattcaggcgtggcagactgttattgattaaattagagctcggtgcccactgcgggttccaggtataaccacctccgagcaccacgatatagtccactttttgcgaattattccatgtcggataggtgctttcgatgggacgcagcaggcggtcggctaccggttgcaaactcaataacaagagcgccagccacccaatgctaataaaaatcttcccggttttttgaaaacggctaaaccacagcagcgccaggccagcgccaataatcaacaacatcagcggaagtggcagcaacatattgccaatcacttttttcagtgtaaaaagcatcctttctggttccttttttaaccatatagcaagggatcgccagcgatattacaccagacgggttcattctcgccgtggctgtgacaaaatagcgtctttatcagaaaacgtcttagccaaccggtggagaaagcaatgcaggatcgcaattttgatgatattgcggaaaagttttcccgtaacatttacggcaccaccaaagggcagcttcgacaggctattctgtggcaggatctcgatcgcgtgctggcggaaatgggcccgcaaaaactgcgtgtgctggatgctggcggtggagaagggcagaccgcaatcaaaatggccgagcgtgggcatcaggtcattttatgcgatctttctgcgcagatgatcgaccgcgcaaaacaggcggcagaagcaaaaggtgtgagcgacaacatgcaatttatacattgcgccgctcaggatgttgcttcgcatttggaaacgcccgttgatctgatattgttccatgcggtgctcgagtgggtggctgatccccgcagcgtattgcagaccctctggtcagtgttgcgtccaggcggcgtgttgtcgttaatgttctacaatgcgcatggtttgttgatgcataacatggtcgccgggaattttgattacgtgcaggcgggaatgccgaaaaagaaaaaacggacgctttcgccagattatccacgcgacccggcgcaggtttatctgtggctggaagaagctggttggcaaattatgggtaagacaggcgttcgcgtgtttcatgattatctgcgcgagaaacaccagcagcgcgactgctatgaagcattacttgaattagaaacgcgttattgccgtcaggaaccgtatattaccctggggcgttatattcatgtcaccgcgcgcaaaccgcagagcaaggataaagtatgagtgaattttcccagacagtccccgaactggttgcctgggccagaaaaaatgacttctccatctcgctgccggtagaccgactctcttttctgctggcggttgccacgctgaacggcgagcgtctggatggtgagatgagtgaaggcgagctggtggatgcattccgccatgtgagtgatgcgtttgagcaaaccagcgaaaccatcggcgtgcgcgccaataacgcgatcaacgacatggtgcgtcaacgtctgctgaaccgctttaccagcgagcaggcggaagggaacgcaatttaccgtctgacgccgctcggcatcggcattactgactactacatccgtcagcgcgagttttctacgctgcgtctttctatgcagttgtcgattgtggcgggtgagctcaaacgcgcagcagatgccgccgaagagggcggtgatgaatttcactggcaccgtaatgtctatgcgccactgaaatattcggtagcagaaattttcgacagtatcgacctgacgcaacgtctgatggacgaacagcagcagcaggtgaaggacgatatcgcccagttgctgaacaaagactggcgggcggcgatttccagctgtgaattgttgctttcggaaacttccggaacgctgcgtgaattgcaggatacgctggaagcggcaggcgacaaattgcaggctaatctgttgcgcattcaggatgcgacgatgacccatgacgatctgcatttcgtcgatcgtctggtgttcgatctgcagagcaaactcgatcgtattatcagttggggccagcaatccatcgacttgtggattggctacgaccgccacgtacacaaatttattcgtaccgcgatcgatatggataaaaaccgcgtctttgctcagcggttacgtcagtcggtacaaacctattttgatgagccgtgggcgctaacttatgccaatgccgatcgtctgctggatatgcgtgacgaagagatggcactgcgcgatgaagaagtgactggggaacttcctgaggatctggaatacgaagagtttaacgagatccgcgaacagctggcggcgatcatcgaagaacaacttgccgtgtacaaaaccagacaagtgccgctggatcttggtctggtggtacgcgaatatctgtcacagtatccgcgtgcacgtcactttgacgttgcgcgtattgttattgatcaggcggtacgtcttggcgtagcgcaagcagatttcaccggactgccagcgaaatggcagccgattaatgattacggagccaaggtacaggcgcatgtcatcgacaaatattgaacaagtgatgccggttaagctggcgcaggcgctggcgaatccgttatttccggcgctggacagcgccttacgttcaggacgccatattggcctcgacgaactggataatcatgcattcctgatggattttcaggaatatctggaagagttttacgcgcgttataacgttgagcttattcgcgcaccagaagggttcttctatttacgcccacgttccaccacgctgatccctcgttccgtcttgtcggaactggatatgatggtcgggaaaatcctctgttatctctatctcagcccggaacggctggcgaatgaggggattttcacccagcaggaactgtacgacgaactgctcaccctggccgatgaagcaaaactgctgaaactggtgaacaaccgttcaaccggttcagacgttgaccgtcagaagttgcaggagaaagtacgttcttcgctcaaccgtctgcgtcgtttaggcatggtgtggtttatgggccacgacagcagcaagtttcgcattaccgaatcggtgttccgcttcggagccgatgtgcgtgctggcgacgatccccgtgaagcacagcgtcgcctgattcgtgatggcgaagcaatgccgattgaaaatcatctgcaactcaacgatgaaaccgaagagaatcagccagatagcggagaggaagaataatgattgaacgcggtaaatttcgctcactgacgctgattaactggaacggcttttttgcccgaacttttgaccttgacgagctggtcacgacgctttctggcggtaacggggcgggtaaatccaccaccatggcggcgttcgttacggcgctgatccccgacctgaccctgctgcatttccgtaacactacggaagccggggccaccagcggttcgcgcgataaaggtctgcacggtaagctgaaagcgggtgtctgttattcgatgctcgacaccattaactcgcgccaccagcgcgtggtggtcggtgtgcgtctgcaacaggttgccggacgcgatcgtaaagtggatatcaagccgtttgccattcagggactgccgatgtcggtgcagccgacacagctggtgaccgaaaccctgaacgaacgccaggcgcgcgtgctgccgcttaacgagctgaaagacaagctcgaggcgatggaaggcgtgcagtttaaacagttcaactccattactgattaccactcgctgatgttcgatctgggcatcatcgcgcgtcgtctgcgctccgcatctgaccgtagcaaattctatcgtctgatcgaagcttcgctgtatggcgggatctccagtgccattacccgttctctgcgcgactacctgttgccagaaaacagcggcgtgcgtaaagcgttccaggacatggaagcggcgctgcgtgaaaaccgtatgacgctggaagcgattcgtgtcacccagtcggaccgcgacctgtttaagcatctgatcagcgaagccaccaactacgtggcggcggactacatgcgtcacgccaacgagcgccgtgtccatctcgacaaagccctggagtttcgtcgcgagctacatacttcgcgtcagcaactggcggctgagcagtacaaacacgtcgatatggcgcgtgagctggcagagcacaacggtgccgaaggcgatctggaagcggattatcaggcggccagtgatcacctgaacctggtgcaaaccgcactgcgtcagcaggagaagatcgaacgctacgaagcggatctcgatgagctgcagatccgtctggaagagcaaaatgaagtggtggcagaagccatcgaacgccagcaagagaatgaggctcgtgcggaagctgccgaactggaagtggacgagctgaaaagccagcttgctgactaccagcaggcgctggacgtccagcaaacgcgcgcgatccagtataaccaggcgattgctgcgcttaatcgtgccaaagaactgtgccatctgccggacttaaccgccgactgcgccgccgaatggctggaaaccttccaggcgaaagagctggaagcgactgaaaaaatgctctctcttgagcagaaaatgagcatggcgcaaaccgcgcacagccagtttgagcaggcttatcagctggtggtggcaatcaacggcccactggcgcgtaacgaggcgtgggatgtcgctcgcgaactattgcgcgaaggggtcgatcagcgtcacctggcagagcaggttcagccgctgcggatgcgattaagcgaactggaacagcgtctacgcgagcagcaagaagctgagcgtctgctggcagatttctgcaaacgtcagggcaagaattttgatatcgacgaactggaagccctgcatcaggaactggaagcacgcattgcctctctttccgatagcgtgtctaacgcccgtgaagagcgcatggcactgcgccaggagcaggaacagctgcagtctcgcattcagagtttgatgcagcgtgcgccggtttggctggcagcgcaaaacagtctcaaccagttgagcgaacagtgcggcgaagagtttacctccagccaggacgtcaccgaatatctgcaacagttgctggagcgtgagcgagaggcgattgttgaacgcgatgaagtgggcgcgcgcaaaaacgccgtcgatgaagagatcgaacgtttaagccagcctggcggctctgaagatcagcgtctgaacgcgctggcggagcgttttggtggtgtgctgctgtcagaaatttatgacgacgttagcctggaagatgcgccgtacttctcagcgctgtatggcccgtcacgccacgccatcgtggtgccagatctgtcacaggtaactgaacacctggaaggcttgaccgattgcccggaagatctctatctgatcgaaggagatccgcagtcattcgatgacagcgtgttcagcgttgatgagctggaaaaagcggtagtggtgaaaatcgccgatcgtcagtggcgttattcacgtttcccggaagtgccgctgtttggtcgtgctgcgcgtgaaagccgtattgaaagcctccatgccgagcgtgaagtgctttccgaacgcttcgccacgctctcctttgatgtacagaaaactcagcgtctgcatcaggcgttcagccgctttatcggcagtcatctggcggttgcgtttgagtctgacccggaagcagaaatccgtcaactgaacagccgtcgcgtcgaactggagcgggcgttaagtaatcatgaaaatgataaccagcagcagcgtattcagtttgagcaggcgaaagagggcgttacggcgctgaaccgcattctgccgcgtctcaacctgttggctgatgacagcctggcggatcgcgtcgatgaaatccgcgaacgtctggatgaagcccaggaagccgcgcgttttgttcagcagtttggcaatcaactggcgaaactggaaccgattgtttcggtattgcagagcgacccggaacagttcgaacagttaaaagaagattacgcgtactctcagcagatgcagcgcgatgcccgtcagcaggcgtttgccctgacggaagtggtgcagcgtcgtgcgcactttagctattctgactcggcagaaatgcttagcggtaacagcgatctcaacgaaaaactgcgtgaacgtctggaacaggcggaagcggagcgtacccgcgctcgcgaagcgttgcgcggtcacgcagcgcagttgagtcagtacaaccaggtgctggcttcgctgaaaagttcttacgacaccaaaaaagagctactcaacgatctgcaacgtgaattgcaggatatcggcgtgcgtgctgatagcggggcagaagagcgggcgcgtattcgccgtgacgagctgcatgcgcaactgagcaataaccgttcacgccgcaatcaactggaaaaagcgcttaccttctgcgaagcggagatggacaacctgacccgcaaactgcgcaagctggagcgggattactttgagatgcgcgagcaggtagtgaccgccaaagcgggctggtgtgcggtgatgcgcatggtgaaagataacggcgttgagcgccgcttacaccgtcgtgagctggcttatctctccgctgatgatttgcgttccatgtcggataaggcgttaggtgcgctgcgtctggcggtggcggataacgaacatctgcgcgacgtgctgcgcatgtcggaagatccgaaacgtccggagcgtaaaattcagttcttcgtggcggtttatcagcatctgcgtgaacgtattcgtcaggatattattcgtaccgatgatccggtggaagctatcgaacagatggagattgaacttagccgtctgaccgaagaattaacctcccgtgaacagaaactggcgatcagttcccgcagcgtggcgaacatcattcgcaaaaccattcagcgcgagcagaaccgtatccgtatgctcaaccaggggttgcagaacgtatcgtttggtcaggtgaacagcgtgcgtctcaacgtgaacgtgcgtgaaacgcacgccatgctactggatgtgctctctgaacagcacgagcagcatcaggatctgtttaacagcaaccgtttgaccttctcggaagcgctggcgaaactgtatcaacgtcttaacccgcagattgatatggggcagcgcacgccgcagaccatcggtgaagaactgctggattaccgcaactatctggaaatggaagttgaggttaaccgtggttccgatggctggctgcgcgcagagtctggtgcattgtcgaccggtgaggcgattggtaccggtatgtcgattctggtgatggtggtacaaagctgggaagatgaatctcgccgcctgcgcggtaaagatatctctccttgccgcctgctgttcctcgatgaagcagcgcgactggatgctcgttctatcgccacgctgtttgaattgtgtgagcgtttgcaaatgcaactcatcatcgcagcgccggaaaatatcagcccggagaaaggcaccacctataaactggtgcgtaaagtcttccagaataccgaacacgttcatgtcgtcggcctgcgaggatttgcgccgcaactccctgaaacgcttccaggaactgacgaagcgccttctcaggcgagttaaaattaaggcggcagcaatgccgccttttctttttccgaaaactccgtttctgcactaaaaaagtggcacattacggcgcgcttttctttaaacttctttacattaggttatgtaaaaacgtatcggcgtttatatactgaagataagcctgatgagtaacaggcttgctcgtcatactttcgtgagtattggcgttgtacaggcaagtcgtaaaataacagcctggctattcagagtatgataaaaacagggggcaagggatgttgcttaatatgatgtgtggtcgtcagctgtcggcaatcagtttgtgcctggccgtaacattcgctccactgttcaatgcgcaggccgatgagcctgaagtaatccctggcgacagcccggtggctgtcagtgaacagggcgaggcactgccgcaggcgcaagccacggcaataatggcggggatccagccattgcctgaaggtgcggcagaaaaagcccgcacgcaaatcgaatctcaattacccgcaggttacaagccggtttatcttaaccagcttcaactgttgtatgccgcacgcgatatgcaacccatgtgggaaaaccgtgatgctgttaaagccttccagcaacagctggcagaggtggcgattgccggtttccagccgcagtttaataaatgggtagagttactgaccgatcctggtgttaacgggatggcacgcgacgtggtgctctctgatgcgatgatgggctatctccatttcattgcaaatattccggtcaaaggcactcgctggctatatagcagtaaaccttatgcacttgcaacgccgccgctctcggtgattaaccaatggcagctggcgctggataaaggtcaattgcctacgtttgttgcaggactggcaccgcagcatccgcaatatgcggcgatgcatgaatcgttactggccttactctgtgacaccaaaccgtggccccaactgaccggcaaagcaacgttgcgcccagggcagtggagtaacgacgtaccggcgttgcgcgaaatattgcaacgcacaggcatgttggacggggggccgaaaattactctacctggcgatgacacgccaactgacgcggtagtcagcccatccgctgttactgttgaaacagcagaaactaagccgatggataagcaaacgacgtctcgtagtaaacctgcgcctgccgttcgcgccgcctacgataatgaactggtggaagccgttaaacgttttcaggcatggcaaggattgggggcagatggtgctattggcccggcaacacgtgactggttaaacgtaacgcccgcccagcgtgctggtgtgttggctctcaacatccagcgattgcgcttgctgccaacagagctttctaccgggatcatggttaacattccggcctattcgctggtctactatcagaacggcaatcaggtgctggattcgcgagtcattgtcggtcgccccgatcgcaaaacgccgatgatgagcagtgcccttaacaacgtagtggtaaacccgccgtggaacgtacctccaactctggcacgcaaagatattctgccaaaagtgcgcaacgatccgggatatctcgaaagccatggctatacggtgatgcgcggctggaacagcagagaagcgattgacccatggcaggttgactggtctacaatcacggcctcgaatttaccgttccgcttccagcaggctccaggcccacggaactcgctggggcgctataaattcaatatgccgagttcagaggccatttatttgcatgacacgccgaaccacaatctgttcaagcgtgatacacgcgcattgagctcaggctgtgtacgagtgaataaagcttccgatctggcgaatatgctgttgcaggatgcaggctggaatgacaaacgtatttctgatgcgctgaagcagggtgatacacgttacgtcaatattcggcagtcgattccggtgaatctctactacctgacggcctttgttggtgcagatggtcgtacccagtatcgtacagatatttacaattatgatctgcctgcgcgatccagctcgcaaatcgtatcgaaagcggaacaattaatcaggtaaatgaagtagttcggggaaatcagttgtcgtaataattagcatgattgggggcgattctctgcagcccccgtcactgctggggttgagtcatcttgacgtctgctttacgggcggttaaggtgcctcttgtgcgccagaagtgcatataaacgataacattgacctgtagacttgattatcatggacaaattcgacgctaatcgccgcaaattgctggcgcttggtggcgttgcactcggtgccgccatcctgccgacccctgcgtttgcaacactctctaccccacgcccgcgcattttgacactcaataatcttcataccggagagtcaatcaaagcggagtttttcgatggcagaggctatattcaggaagaattggcaaaacttaaccattttttccgcgattaccgcgcgaacaaaataaagtccatcgacccaggattattcgaccagttgtatcgcctgcaagggttgttaggcacgcgcaaaccggtgcaactcatttccggttatcgttctattgataccaacaatgaactacgcgcccgcagccgtggagtagcgaagaaaagctatcacactaaaggccaggcgatggatttccatattgaaggtatcgcgttaagcaatattcgcaaagccgcgttatctatgcgcgcaggtggtgtaggatattatccacgtagtaactttgtgcatattgataccgggccagcacggcactggtagtaattgcttaacgaaacaggggcagtatgaactatcgtattattccggtcaccgcattctcccagaactgttcattaatctggtgtgaacaaacccgtctggccgcactggtcgatcctggcggcgatgcggaaaaaatcaaacaggaagttgatgacagcggcctgacactgatgcagatcctgctgacgcatggtcatctggaccacgttggcgcagcggcggaactggcgcaacattacggcgtgccggttttcggcccggaaaaagaagatgagttctggctgcaaggcttgcctgcgcaaagtcgtatgtttggtctggaagagtgccagccgctgacgccagatcgttggctgaacgaaggcgataccatcagcatagggaatgtgactttacaggtgttacattgccctgggcatacgccgggtcatgtcgtgttttttgatgatcgggcaaagctgctgatttctggcgatgttattttcaaaggcggagtagggcgcagtgacttcccgcgtggcgatcataatcaactgatttcttcaatcaaagataaattgctgccactgggggatgacgtgatatttattccgggtcacggaccattatccacacttggttatgaacgcctgcataatcccttcctgcaagacgaaatgcccgtctggtaaggcacataaaaaagcccgcttttaatgctggcctggatttctggcaaagtgcgctttgtttatgccggatgcggcacgagcgccttatccggcctacaaaatcgtgcaaattcaaaatattgcaggggacgcgtaggcctgataagcgtagcgcatcaggcaatgttgcgtttgtcatcagtctcagcccgcttttcagcgggcttcattgtttttaatgcttacagcactgccacaatcgcttcgcacagcggagccatgttatctggtgtcatcccggccacatttacgcgaccagaagcaaccgcatatacgccaaactcttcgcgcagacgcagcacttgttcttttgtcaggccactgaaggagaacatgccgttctgtttgatgataaagctgaagtcgcggtttgcgcctttttcctgcagcgtattgacgaacaactgacgcatacgctgaatacgctggcgcatatcagtcagctcttgttcccaaatcgcacgtaacgcatcgttgctcaggatggtggcaacaacagaagcgccgtgtgctggtgggttagagtagttagcgcgaatcgccgctttcatttggctgaatgcgcgatcaacggtttcactgtcggcagcaaccagagtacaagcgccaacacgctcgttgtacaggccaaagtttttagagtaggaactggcaacaatcagctctttatgcatagccgcgaaagcgcgcagtccttcagcatcttcttccagaccacgggcaaaaccctggtaagcgaagtcaaacagcggtaaccagcctttctcaacggagagttgtgccagtgtttgccattgttccagcgtagggtcgataccggttgggttatggcagcagccatggaacagcactacgtcgccagcctgagcttcattcaggctgttaatcagtgcatcgaagtcaagagtgtgattttccgcatcataataagcgtattcacgaacttccagacctgcagagttaaagacgctcttatggttcggccagcttgggttgctcacccacacacgcttaacgctggtattttttgccaggaaatcggcagccacgcgtagtgcgccagtgccccccggagtctgtgccgtgcgagcacgtttgtcattgatcagggcgctacctttaccaaacagcagttcctgagtgcagcgaccaaattcagggatgccgtcaatgccgaggtaatttttggtggtttcattttcgagcagatactgttcagcctttttcacgctggtcagtaccggggttttgcccgtctcatctttatagacaccaatcccgaggttaattttgccgggacgttcatcggcacgaaacagatcggccaggcccagaatcgggtcggcaggagcggcggtaatgttctcaaacatgacgaggttccattatggttacagaagggaagtccgctatcagggtaacgggagatttacaaaattccaactattactgatgaaaacgcaggctgtttttgcaagacgtgagattgctctggaaggtataaaaaaaacaggaccaaagtcctgttttttcggcatttaacaaagaggtgtgctattagaactggtaaacgatacccacagcaacggtgtcgtctgaacctacgcccagtttgttgtcagaatcgatctggttgatgatgtagtcaacataggtggacatgtttttgttgaagtagtaggttgcgcccacttcaaagtagttcaccagatcaacatcaccgataccttctacgtctttcgctttagatttggtgtaagcgatggacggacgcagaccgaaatcgaactggtattgcgcaactaacagaacgtcttgcgttttgttggcgaagccgctggtgtttgtaaatttattagtgatcggcgtagcgttacgggtttcaccgtagttcgctgccaggtagatgttgttcgcgtcgtacttcagaccagtagcccactgttcagcttttttaccgttgccaagaggttgagcttcttgcaggttggtacggtcagctgcaccataagcaccaacgataccaaagccttcgtattcgtagctgatagaaccgccaacaccgtcgccgttagaacggcgtgcagtgtcacgctcgtttttacccaggtactgaacagcgaagttcaggccatcaaccagaccaaagaagttggagttacgataggtagcaacgccgccaacacgaccaacgaagaagtcatcgctgtatgcagtatcaccaccaaattctggcagcatatcggtgtaacccagtgcatcataaaccacaccgtagttacggccgtaatcgaaagaaccaacgtcagcgtatttaagacccgcgaatgccagacgcgttttgttaccagtttgagcgtcagcgccttcagagttgttaccctggaagttatattcccactgaccataaccggtcagatcggaattgatttgagtttcccctttaaaaccaagacgggcataggtcatgtcgccattgccaccgtaactgttttcaccgttacccttggaaaaataatgcagaccaacagctttaccgtacagatctactttgttgccatctttgttatagatttctgcagcgtttgcagtacctgctactaacagagcagggacgatcactgccagaatattgcgcttcatcattatttattaccctcatggttttttttatgacacctgccactgccgtcaataagttctgtcaataaaaatttacggaactattgatgagagtttggtgtctttatgtgtctgcaggcatctttccattcaaactaacgtttcgctaccgtgaaagtgctacaaagataaagatttggtttcaaaaagaaaaaatatgtaaccaaaagtaaaatttaaggaactttgtgaacaccgtcatatttccatagagacgtgatgatatttacagcaattttaatctatttatatgatttccttatatttaaattaactaaacggaaattttgtttctgatggaaactttatcgacctggcacaaaatcttctttcagacatccagaatgccaaaaaatagtatgaaaattgtgctattagctaagaaaaaactaatccgcaataagaatgcggattagtttttgcgcgtaaatgttgcaatgtaatattccgtaacaggatgatcgttatggcggggttgcaaatagattgcttgacttaacaaacagataacttgacagaaaagataaaaaaagagccagcgggcgctggctcttgaagacgctaaattagaagctggcgttacgcggagtacgtgggaacggaatcacatcacgtacgttttgcacgccagttacgtaagcaatcagacgttcaaaaccaagaccgaaacctgaatgcggaacagtaccgtagcgacgcagatcgcgataccaccagtaatcttctttattcaggcccatttccagcatacgctcgtccagcacgtccagacgttcttcacgctgggagccaccaatgatctcaccgatgcccggagccagaacgtccatagccgcaacggttttaccgtcttcgttaaggcgcatatagaacgctttaatatctttcggatagtttttaaccactaccggtgctttaaagtgttcttccgccagataacgctcatgctcagaagagagatcgactccccagtaaaccgggttttcaaacttcctgccgcagttttcgagaatggtcactgcgtcggtataatccacctgcgcaaaatcggcttcaatgaagcgttccagacgtgaaacggcatctttatctacgcgttcagcgaagaatttcatgtcgtcagcgcgttcttcgagaaccgctttgaagacatatttcagcatggcttcagccagacccgcaatatcgttcaggttagcaaacgccacttccggctccagcatccagaattccgccaggtgacggctggtgttggagttttcagcacggaaagtcgggccgaaggtataaattttggacaatgcgcaagcgtaggtttcgccgttcaactggccagatacggtcaggaaagactctttaccaaagaagtctttgtcgaaatccactttgccctgatcgttacgcggcaggttttccagatccagcgtagaaacgcggaacatttcgcctgcaccttcggtatcagatgcggtaatcagtggcgttgaaacccagaagaatccctgctcgttaaagaagcgatgcagcgcctgcgccagcgtatggcgaacgcgcgcgacggcaccaatcaggtttgtgcgcggacgcaggtgagcgacttcacgcagatactcaatgctgtggcgttttgccgccatcgggtaagtgtctggatcttcaacccaaccagcaacttcaaccttgctggcctgaatttcaaattgttgcccctggcccggcgacgccacgactttacccgtcacaatgaccgagcagccggtggtcagacgcaggacgtcttcattgtaattgggcagagaattattgatgacagcctgtacaggatcaaagcaggaaccgtcataaacggcgaggaaggagatgccagcttttgaatctcggcgggtacgtacccatccgcgcacggtgacttcgctgtcaacggctacacggccctggagtacgtcggctacaggcacaacgctcataatattctctctgttaatagtcggaaaaaataaacacttgtccacccgtaaatggggggatacctatgttacctggcatctgcaatcagacaagcagaattcgcaaatgcagcgaaagatttcggaattaaaggtaaaaaaagggagccgattagctccctgatgatattaactggcttttttaatatgcggaaggtcgaacgctttgcgcagcgcccgaacaaacgctttatcatggcagatagttttgccagggctgtcagaaagtttcgccaccggtttaccgttacactctaccaacttaatgacaatattcaggggttttacctgggggatatcgcaggtcaggcgagtcccaataccaaaacttaattgcacgcgggaagagaagtggcggtatagctcaaccgctttgcgtaaatccagattgtcagagaaaaccagcgttttactctgtggatcaattcccagcttttcataatgtgcaatggctttttcaccccattcaaccgggtcgccagagtcatgacgcaggccctgataccgactagcgaactcgacaccgaaatcacgcaggaaagcatccatagtgatgcagtcggttaatgcaatgccaagttggtcgggatactcttccagccaggcagcaagtgcagctcgctggctgttggctagatccgggctgatttgctgatgtgcctggaaccattcgtgtgcctgtgttcccatcggcgtgagggaaagccgacgcgccagatcgtagttgctggtgcccacaaaccaggattcctgttgcagacgcttaacgatggtttcttgtacttcgcgagaaaaacggcgacgggtgccaaaatccatcagatggaagcgcgacatatcaagaccggcggttaacgccgagaagtcgactaatttgctttccagcgtgtcgagggcttgcgcaacgtcggcctgcggtgagcgatagcgatgtaccatttcactgataaccgccagcaaaggaacttcccagaggatgacttcacgccacgggccgcttaaacgaatatccagcttgccattatcgttggacacggtgacttgttccgggttaaagcggaactcgcgtaaccagttaagatagtcggccttaaagaaaggcagggcagaaagccactgatattcatcatcctgcaggcgcaggtgctgcatcgcctgaacctgttcacgaatagcatcggcataaatacccagcagatcgtcacctcggcaacgaaactccgccgcgacatgcacatcgtaatagtgatgaaacacggcttgctgcatatgcaacttataagcatctgtatccagcaacgagtgcagaacaggagaagcgaattgtgtcataggtgcgcagtagcgtcctcgtacaggagcgtttagtacaataaacatcttcaggaactgctggagtataccttgtttcgcaatttattgaaccccgatcacaccatatgccacctttctggtcgatggcattacgcggtgtatgttataaaaatgtagcaataaaggcgtttgtacctgaaaagatgaagattctgcatagcgcgatttacgcaacaggaatagactgaacaccagactctataaaagatgctaaaggttatttatgactcaacagccacaagccaaataccgtcacgattatcgtgcgccggattaccagattactgatattgacttgacctttgacctcgacgcgcaaaagacggtcgttaccgcggtcagccaggctgtccgtcatggtgcatcagatgctccccttcgtctcaacggcgaagacctcaaactggtttctgttcatattaatgatgagccgtggaccgcctggaaagaagaagagggcgcactggttatcagtaatttgccggagcgttttacgcttaagatcattaatgaaataagcccggcggcgaataccgcgctggaagggctttatcagtcaggcgatgcgctttgcacccagtgtgaagccgaaggtttccgccatattacgtattatctcgaccgcccggacgtgctggcgcgttttaccaccaaaattattgccgataaaatcaaatatcccttcctgctttccaatggtaaccgcgttgcgcaaggcgaactggaaaacggacgccattgggtacagtggcaggacccgttcccgaaaccgtgctacctgtttgcgctggtggcaggcgactttgatgtactgcgcgatacctttaccacgcgttctggtcgcgaagtagcactggagctgtacgtcgatcgcggcaaccttgatcgcgcgccgtgggcgatgacctcgctgaaaaactccatgaaatgggatgaagaacgctttggcctggagtatgacctcgacatctatatgatcgtcgcggtggatttcttcaatatgggcgcaatggagaataaggggctgaatatctttaactccaaatatgtgctggcccgcaccgacaccgccaccgacaaagattacctcgatattgaacgcgttatcggccatgaatatttccataactggaccggtaaccgagtgacctgtcgcgactggttccagctcagcctgaaagaaggtttaaccgtcttccgcgatcaggagttcagctctgaccttggttcccgcgcagttaaccgcatcaataatgtacgcaccatgcgcggattgcagtttgcagaagacgccagcccgatggcgcacccgatccgcccggatatggtcattgagatgaacaacttctacaccctgaccgtttacgagaagggcgcggaagtgattcgcatgatccacaccctgcttggcgaagaaaacttccagaaagggatgcagctttatttcgagcgtcatgatggtagtgcagcgacctgtgacgactttgtgcaggcgatggaagatgcgtcgaatgtcgatctctcccatttccgccgttggtacagccagtccggtacaccgattgtgaccgtcaaagacgactacaatccggaaaccgagcagtacaccctgaccatcagccagcgcacgccagccacgccggatcaggcagaaaaacagccgctgcatattccgtttgccatcgaactgtatgataacgaaggcaaagtgatcccgttgcagaaaggcggtcatccggtgaattccgtgctgaacgtcactcaggcggaacagacctttgtctttgataatgtctacttccagccggtgcctgcgctgctgtgcgaattctctgcgccagtgaaactggaatataagtggagcgatcagcaactgaccttcctgatgcgtcatgcgcgtaatgatttctcccgctgggatgcggcgcaaagtttgctggcaacctacatcaagctgaacgtcgcgcgtcatcagcaaggtcagccgctgtctctgccggtgcatgtggctgatgctttccgcgcggtactgcttgatgagaagattgatccagcgctggcggcagaaatcctgacgctgccttctgtcaatgaaatggctgaattgttcgatatcatcgacccgattgctattgccgaagtacgcgaagcactcactcgtactctggcgactgaactggcggatgagctactggctatttacaacgcgaattaccagagcgagtaccgtgttgagcatgaagatattgcaaaacgcactctgcgtaatgcctgcctgcgtttcctcgcttttggtgaaacgcatctggctgatgtgctggtgagcaagcagttccacgaagcaaacaatatgactgatgcgctggcggcgctttctgcggcggttgccgcacagctgccttgccgtgacgcgctgatgcaggagtacgacgacaagtggcatcagaacggtctggtgatggataaatggtttatcctgcaagccaccagcccggcggcgaatgtgctggagacggtgcgcggcctgttgcagcatcgctcatttaccatgagcaacccgaaccgtattcgttcgttgattggcgcgtttgcgggcagcaatccggcagcgttccatgccgaagatggcagcggttacctgttcctggtggaaatgcttaccgacctcaacagccgtaacccgcaggtggcttcacgtctgattgaaccgctgattcgcctgaaacgttacgatgccaaacgtcaggagaaaatgcgcgcggcgctggaacagttgaaagggctggaaaatctctctggcgatctgtacgagaagataactaaagcactggcttgataaataaccgaatggcggcaatagcgccgccattcggggaatttacccctgttttctcaggcgagtttcagattcaccacgttgcatcacccgttgcaacacctccgcttccagctccgctaatcgcaccgaccctaatcgacgcggacgggggatatccactgtcaaatccagaccaatttttccctcttcaattaacagcacccggtcagccatcgctaccgcttcgctcacatcatgcgtcaccaacagtacggtaaagccgtgctcctgccaaagtgacacaatcaaatcctgcatctcgagtcgcgttaaggcgtccagcgccccgagcggttcatcaagcaacaataatcccggtcgatgaatcaacgctcttgccagcgccactcgctgtttctgcccgccagaaagtgcggcaggccattcccctgcgcgattctccagtcctaccgcagccaacgctcgacgtgcggcatcgcgccactggcctttaaggcctaacccaacgttatcaatcaccgatttccacggtagcagacgcgcatcctgaaacatcattcgcgtgtcttcctgaatttcagccagcggtgtggtgcccgctaacacatcgcctgcggttggcgtttccagacctgccagcaggcgcagcagggtacttttgccaccaccgctgcggcccaccaccgccacaaactgacctgccggaatatgtaaatccagttggttcaggacgatattttccgcgtaatgtttgcttactgcattgagcaacaatggcgtgccctggttcagacgagcagtattcataccgtggcctccttcaaatgataagccgggttccagcgcaaccagaggcgctctaacagctgcgcgctgacgtcagccagtttgccgagcagggcgtaaagaataatagcgactaccaccacgtccgtttgcaaaaactcccgcgcattcatcgccagataaccaatgcctgaattggcagaaatggtttcggcaacaatcagcgtcagccacatcaggcccaacgcaaaacgcacgccgaccataattgagggcagggcaccaggcaggatcacatggataaacagcggtatgccggataatccatagctacgcgccatctccaccaacccgcgatcgatattacggatgccatgccaggtgttgatataaatggggaatagcgtaccgagcgccaccagaaagatttttgcggattcatcaatgccaaaccacaaaatcaccagcgggatcagcgccagatgcggcacgttgcgcaacatctgaattgaggtatccagcagccgttctccccagcgagatagcccgctaatcagtcccaaaatcaaccccagcgatccgccaattgaaaagccaatcagcgcccgccaggagctgatcgccagatgctgccacagttcgccgctggcggagagcgtccagaacgccgtcaccactccttccggtgaaggcaaaatacgcgtcgacagccagccaaccgaggaggccagttgccacaccgccacgatgcccaccggtaaaaaccagggggcaacgcgcaataaccacttcttcactggcgttgccattatttcttccttagctttgcgcgactttacgggggataaaatcattcgccaccgcttcgccttgcggattcagcggctgcggctggggaatttccgggatggcgacatccagaagcgggaacagcaactcgccaacccgatacgcttcttccagatgcggatagcccgaaagcacaaaactgtcgatgccaagcgcggcatattcgttgattcgcgcagcgaccgtaggaccatcgcccaccagcgccgtcccggcaccgccgcgcactaagccaacgcccgcccataaattggggctgatctccagattgtcgcgcttgccgttatgtaacgccgccattcgctgttgccctacggaatccgtccgggcgaatgcggcctgtgctttggcgatagtttcatcatcaagatgcgagattaaccgctcggcggcctgccacgcttcgtcgttagtttcacgaacaatcacatgcagacgaataccgaaacgaattttgcgtccatgcgcggcagctttcgcccgcacttgttcgattttctctttaaccagttccggcggttcgccccaggtgaggtagagatcaacctgttctgccgccagctcctgggcgacatctgacgatccgccaaagtaaagtggcggatacggctgttgaatcgccgggaagagcagttttgctccgcgcacatgaatatgtttaccgttgaaatcgacggtttctctctgcaataaacgccgccagacctgggtaaattccgccgaggcttcgtagcgctcgctatgatcaaggaacactccgtcgcctgccagctcttgtggatcgctgcctgtgaccaggttaaacaacgcacgtccatttgagagacggtcaagcgtggcggcctggcgggcggcaacggtaggtgaggttacgctgggacgcagggcgacaagaaacttcagccgctgcgtcaccgggatcatcgatgcggcaaccagccacgcatcttcgcaggagcgccccgttggaattagcacaccggtatagccaagacgatccgccgcttgcgcaatttgttgcagataaccgtgatcaaccgggcgtgaaccttcttccgttcccagataatgcccgtcaccgtgggtcggtaaaaaccagaacatattcagactcataattgttttccttccagttgagtgggctgccagatgcgctggcgaatatcgacttttttcggcaccagacgattttcataaaacagatctgccgtttgctgctgtaaggcggcaacctcggcgttaaccggtttgatggtggtaggagggcgatgatctaagtaagaggcaatcaccggtgccggtaagcccatcgtttttgccagtaaagcgatgctttgctcgcgctggctgcgggttaacgcatcggcctcactaaaggttgccagtacgccctgaataaaagcgccgtttttttctgcatagggacgagctgccagataaaacgatccagtttgattgagatcggtgccgtctttcagcacccgcacgccgccctgtaataatgcagcagagtagtagggatcccagatagcccaggcgtcaacgttaccttgctggaacgcggcgcgggcatcagcgggcgtcaggtaagtgggttggatatcggtaaacttaagtccggcctgacgcagtgcacgcagtaaaaggttgtgtgaactggaacctttctgaaaggcaactttgtgacctttaagatcggctacggttttgatcgggctgttttctgccaccagaatcacttcggctttgggcttcggtggctcgacgcccacgtacaccaaatcagccccggcagcctgggcaaagattggcggaatatccccggtactgccgagatcaatactgccaacgtttaacgcttccaacatttgcggacccgcggggaactccacccaggagatttttgattccggatagcgtttttccagtaactggtggctttttgccagcaccataccaatactgcctttctgatagcctatacgtaacgcttcaggcgaggattctgcagcaaccgcaaaagtagagacgctaagcaatcccgccagcgccagtttaatgatgttacgcatgggcattacctcgcagagacagaaggtcaggaacctgaacatcgcggcggtgcaatgcctgccagaaagtttctagcgcggtatcaagacgggtttgcagatttggcgtgaactggggtctgtgatggtaatcaattacttgtgagtcatcggcaaacacgccgtgcaggatctcctgagctttcagtgcgcttaaaactggtttaagggcataatcgaccgccagcagatgggccacggtaccgcccgtcgccagcggtagcaccactttgccttgcaaagcgcgttctggcagcaggtcgagcagggttttcaacgcaccggaataggcggctttatacacaggcgtggcgacaatcagcccatcggcctgttgcagctgttcggtgaaggtcttgagtgccggactatcgaaacgagcataaagtagatcttccggggcgaagttttgcagattccagtgataaacctctacatccaggccatttagtttttcccgcgcatattccagcaaggagctggagcgagaaggaaagcgaggactacccgccagggtgatgacacgcatactctctccttataaccaattgttctttttttgttaacattgataacaattcggtcagtctgtcggagagacaagaaaattccaaatataaattttgtgtatctttttctgaaaataaactaaagaaagggctttatatatcacgcatatttatttattggatagtcattagatgttgaatcaatgaattactcgttcagttaatatttaaatattcatgaaatctataaattaaagatttgtcacttattggatttagtatgcttgatttaaatggcggacaattattgttattattaagtctaatgtcatttaaaggcattatcatatttacgaagagatcaggatgataacgatgaaaaaaagtgtattgacggcgtttataactgtggtatgtgcaacgtccagcgttatggctgctgatgataatgctatcacggatggctcagtaacatttaatggtaaagttattgctccagcttgtaccctggtagctgcgacgaaagattccgtggtgactttgccagatgttagtgccacgaagttgcaaaccaatggtcaggtttctggcgtgcaaattgatgtgccaattgaattaaaagattgtgatactaccgtaacaaaaaatgcaacgttcacctttaatggcactgcggatactactcagattacagcgtttgctaaccaggcctcatctgatgctgctacaaacgtggccctgcaaatgtatatgaatgatggtacaacggccatcacgccagacacagaaaccgggaacattttgttgcaggatggagatcagacgttgacttttaaagttgattatatcgctacggggaaagcgacttcaggtaatgtgaatgcggtaacaaatttccatattaactattattaatagaactcattaattgttttattaattagtacccctccagtgttctggaggggatattcatattttttaagagtgactatttatgaaaacttgcataacaaagggaattgtgaccgtaagtttaacggcaatattactcagctgctcatccgcatgggcggcaggtaaaggcgggattggacttgcagcaacacgtcttgtttattcagaaggtgaagagcaaatttcactgggtgtacgtaacaccagtccggatgttccttatcttattcagtcatgggtgatgaccccagataataaaaaatcagcagactttattattacaccaccgctatttgtgctgaatccggcaaatgagaatctgttacgcattatgtacattggagcgccgttggcgaaagacagagaaacccttttcttcactagcgtacgggcagtcccttcaacaacgaagcggaaagagggaaataccctgaagattgccacacaaagcgtcatcaaacttttctggcgaccaaaaggtttagcgtatcccttaggcgaggctccggcgaaactgcgttgcacttcgtcagctgacatggttacggtcagtaacccaacaccttatttcattaccctgacagacctgaaaataggtggaaaagtagttaaaaatcaaatgatttccccctttgataaataccaattttctctgccaaagggggccaaaaatagcagcgtaacgtatcgaaccatcaatgactacggggcggaaacgccgcaactcaactgtaaatcgtaagccgtcttcagttaagagagcgagatgtatagaactcatcgacaacacagcctgttaagctctggtggagtgccatcgtttattggtgggctggtggtgtttgtgtcggcagcgttcaatgcacaagctgaaacctggttcgatcctgcttttttcaaagatgatccctcaatggtggccgatttgtctcgtttcgaaaaaggacaaaaaataacgccaggggtttatcgtgtcgatattgttctgaatcagacaattgtagatacgcgcaacgtcaattttgttgagataacgccagagaaggggattgccgcctgtttgacgactgaaagcctggatgcaatgggtgttaatactgatgcgtttccggcttttaaacaactggacaaacaagcgtgtgtgccattggcggagattattccggatgccagcgtaacgtttaatgtgaataaactccgtctggaaatttcagtaccgcaaatcgccatcaaaagtaatgcccgtggttatgtcccccctgaacgttgggatgaagggatcaacgcgctattactgggatattcgtttagcggggctaacagtattcatagcagcgcagacagtgattctggcgacagctattttctgaatttaaacagtggcgttaatttaggcccatggagattgcgcaacaattcaacatggagtcgtagtagtggccaaaccgcagaatggaagaatctcagcagctatttgcaacgggcggttattcctctgaaaggcgaactgaccgtaggtgatgattatactgcaggcgattttttcgatagtgtcagctttcgtggtgtgcagctggcgtcagatgacaacatgctgccagacagcctgaaagggtttgcgcctgtggtgcgtggtatcgccaaaagcaatgcccagataacgattaagcaaaatggttacaccatttaccaaacttatgtatcgcctggtgcttttgaaattagtgatctctattccacgtcgtcgagcggtgatttgttagttgaaatcaaagaagcggacggcagcgtcaatagctacagcgtaccgttctccagtgtgccattactccagcgtcaggggcgaatcaaatacgcggtgacactggcgaaatacagaaccaatagtaatgaacagcaggagagcaaatttgcccaggccacgttgcagtggggcggaccgtggggaacgacctggtatggtggtggacaatatgctgaatattaccgtgccgccatgtttggtctgggatttaacctcggcgatttcggagcaatttcgttcgatgcgacccaggcgaagagtacgctagcagatcaaagcgaacataaaggtcagtcatatcgttttctgtatgccaaaacgctcaaccacttgggcactaactttcaattgatgggctatcgctattcgacgtcgggtttctacaccctttccgacaccatgtataaacatatggatggctacgaatttaatgacggtgatgatgaagatacgccgatgtggtcgcgttattacaatttgttttacaccaaacgtggcaaactgcaggtcaatatctcccagcaattaggcgagtacggttcgttttatttaagtggtagccagcaaacttactggcatacggatcaacaggatcggctattacagtttggctacaacacgcaaattaaagatctttcgctggggatttcctggaactacagtaagtcccgtggtcaacctgatgctgatcaggtgtttgctctaaatttttccctgccgctcaatctgttgctccccagaagtaatgatagctataccaggaaaaaaaattacgcctggatgacctctaacaccagtatcgataacgaagggcacactacacaaaacctgggtttaacggagacattactcgatgacggtaacctgagctacagcgtgcaacagggatataacagcgaggggaaaacggctaatggtagcgccagcatggattacaaaggggcgtttgcggatgcccgagtgggctacaactacagcgataacggcagtcaacaacaactgaactacgctctttcaggcagtttagttgcccattcacagggcattaccctggggcaatcgctgggggaaactaacgttctgattgcagcaccaggcgcagagaatactcgtgtggcgaacagcaccgggctgaaaactgactggcgcggatataccgttgttccttatgccacttcttatcgggaaaatcgaatcgcacttgatgcggcgtcgttaaaacgtaacgtggatcttgaaaatgcagtagtcaacgtggttcccaccaaaggggcgttggttctggcggagttcaatgcccatgcgggtgcaagggtattaatgaaaacatcaaagcagggtataccgctgcgttttggcgcgatagcgacgctggacggcgtacaggctaatagcggcataattgatgatgatggctcgctctatatggcgggtttaccggcgaagggaacaataagcgtgcgctggggcgaagctcccgatcaaatttgtcatatcaattacgagcttaccgaacaacaaattaactctgcgattacgcgaatggatgccatatgcagataatctttggagaaaaatgcgtgtcattactacgactattttttgccgccgtcttaatgttatggtgcgctcaaaccgctgcttatagcgggcagtgtcatactactcaggggaatccgtatattggcgtcaattttggcgttaaaaccctggaggaagaagcaaatacggcaggggtagttaaagacaaattttatcagtggaacgaatcgaatgattattatgtttcctgtgattgcgataaagacaatgtcagaagtggccgatgggcattcgccgcggattcaccgttagtctatttaggcgacaactggtacaaaattaatgactatcttgccgccaaagttttattgcaggttaaaggcagttctcctactgcggttcctttcgaaaacgtgggcacagggggggatacccgatggcatatttgcgaccctggcggtcaacgtttaggtgggcagggggcaagcggtaatagcggtagcttttccctgaaaatattgcagccgttcgttggctcggtcgtcattcctcctatggcgctggcgcgattatatgaatgctacaacatacccgcaggtgattcctgcacgactacaggtacaccggttttagtgtattacctgtctggtacgatcaattcacttggctcatgttccgtcaatgccggagagacaattgaagttgatttaggtgatgtcttcgctgccaatttccgtgttgtagggcataaacctcttggggccagaacggcagaacttgcaattccagtcaggtgtaacacgggaaacgcgggattagttaatgtcaacctgagtctgacggcaaccacagaccccagctatccccaggcgattaagacgtcacgtcctggcgtgggcgtggtggtgaccgatagccagaacaacattatttcccctgctggtggaacattaccgctctctattcctgatgatgcagacagtatcgcgcgaatgaatgtctatccagtcagcacgacaggtgtaccaccagaaaccgggcgatttgaagccacggcaacggtgagaataaattttgattaacgcgtgaacgtatgaagaaaaaaacgatatttcagtgcgttatcttgttctttagcattcttaacatccatgtcgggatggctgggcctgaacaagttagtatgcatatttatgggaatgtggtcgatcagggctgtgatgtcgccaccaaaagtgcattacaaaatattcatattggtgattttaatatcagtgattttcaggccgcgaataccgtaagcactgctgctgatttgaatatcgatatcaccggttgtgccgctggtattactggcgcggacgtcctttttagcggcgaggctgacacccttgcgccgacactgctcaaactaactgacacaggcggaagcggtggtatggcaacggggattgccgtgcaaattcttgatgcgcaaagtcagcaagaaatcccgctcaatcaggtccagcctcttacgcccttaaaagccggggataacacactcaaatatcaacttcgttataagtccacaaaggcgggagcaacgggcggtaatgcgacggcggttctctattttgatctggtttaccagtgaaggagtgatgttgaaacggataatctggattctgttcttattgggattaacgtggggctgtgagctatttgcccatgatggcacggtcaacattagcggatcgtttcgccgtaatacatgcgtgctggcacaggatagcaagcaaatcaatgtgcagttaggcgatgtctcgctgacacgtttttctcatgggaattatggcccggagaaatctttcatcattaatttgcaggattgcggaacagatgtcagcacggttgacgtcaccttttcaggaacccccgacggagtgcagagcgaaatgttgtccattgaaagtggtacggatgcagccagcgggctggcaattgcgattctggatgatgcgaagatattgattccgcttaaccaggcgagtaaagactacagcctacatagcggtaaggtgccattaactttttatgcgcaattgcgacctgtcaatagcgatgtgcagtcgggtaaagtgaatgccagcgcgacatttgtacttcattatgactaatacgtggaacagattggcgctcttgattttcgccgttttatcgctgctggtggcgggtgaattgcaggcaggagtggtggtcggcggaacgcgatttatctttccggcagacagagaatcgatatctattttactgactaataccagtcaggaatcctggcttattaacagtaaaatcaaccgcccaacgcgttgggccgggggggaagcgtcgacagtgccagcaccattactggccgctccgccacttattctcctgaagcccggtacgacaggcacgttgcgcttgctgagaacggaaagcgacatcttgcctgtggatcgcgaaacgctatttgagttaagcattgccagcgtgccatccggcaaagttgaaaatcagagcgtaaaagtggcgatgcgctcggtatttaaactgttctggcgacccgaaggtttgccgggcgacccgctggaagcttatcaacaattacgctggacacggaattcgcagggtgtacaactcactaacccaacgccttattacattaacctgattcaggtgagtgtaaatggtaaagcgttaagtaatgtgggagttgtgccgcctaaaagccagcgtcagacaagctggtgtcaggcaatcgcaccgtgtcatgtcgcctggcgggcgataaatgattacggcgggttgagtgcaaagaaggagcaaaatctgccctgaaacaggttcggaaaacgtttgcgttttttttgccgcaggtcaattcccttttggtccgaactcgcacataatacgcccccggtttgcacaccgggaatccaggagagttcatgtactaccccttcgttcgtaaagcccttttccagctcgatccagagcgcgctcatgagtttacttttcagcaattacgccgtattacaggaacgccgtttgaagcactggtgcggcagaaagtgcctgcgaaacctgttaactgcatgggcctgacgtttaaaaatccgcttggtctggcagccggtcttgataaagacggggagtgcattgacgcgttaggcgcgatgggatttggatcgatcgagatcggtaccgtcacgccacgtccacagccaggtaatgacaagccgcgtctctttcgtctggtagatgccgaaggtttgatcaaccgtatgggctttaataatcttggcgttgataacctcgtagagaacgtaaaaaaggcccattatgacggcgtcctgggtattaacatcggcaaaaataaagatacgccagtggagcagggcaaagatgactatctgatttgtatggaaaaaatctatgcctatgcgggatatatcgccatcaatatttcatcgccgaataccccaggattacgcacgctgcaatatggtgaagcgctggatgatctcttaaccgcgattaaaaataagcaaaatgatttgcaagcgatgcaccataaatatgtgccgatcgcagtgaagatcgcgccggatctttctgaagaagaattgatccaggttgccgatagtttagttcgccataatattgatggcgttattgcaaccaataccacactcgatcgttctcttgttcagggaatgaaaaattgcgatcaaaccggtggcttaagtggtcgtccgcttcagttaaaaagcaccgaaattattcgccgcttgtcactggaattaaacggtcgcttaccgatcatcggtgttggcggcatcgactcggttatcgctgcgcgtgaaaagattgctgcgggtgcctcactggtgcaaatttattctggttttatttttaaaggtccgccgctgattaaagaaatcgttacccatatctaattatttcttcgaattcctctttataagataatcagggctttattttcagccctggttgttttatattcatcgctgttgcttatttagacattttgtacttttattgttgaggttattaagcgaagcgacaatggattgtgttgctgcggttttatagggtaggggagaggcagatgcgaattaaaccagacgataactggcgttggtattacgatgaagagcacgatcgaatgatgctcgatttagccaatggtatgctatttcgctcacgttttgcgcgcaagatgttgactccagatgccttttctcccgcaggcttttgcgttgacgacgccgcgctctatttctcttttgaagaaaagtgccgcgattttaatttatctaaagaacaaaaagccgaactggtgctgaatgcactggtagcaattcgctatctcaaaccgcaaatgccgaaaagctggcattttgtttcccatggtgaaatgtgggtgcccatgccgggcgatgcggcctgcgtttggttgagcgatactcacgagcaggtcaatttgctggtcgttgaatctggcgaaaatgccgcactatgcctgctggcacaaccctgcgttgttattgcgggtcgcgcgatgcagttgggcgacgccattaaaatcatgaacgacaggctgaaaccgcaggttaatgttgacagcttcagcctcgaacaggcagtctaacgcgccaacttaagtgcagtcttcggtacacagctacagcaaagaatggtgccatcatcgcccattgctgattttttcagcggcgtgacttcgccttctaaaagctgaacacggcaacttccacaaatgcccgcgcggcaagaataagggatacgaattccctgattttctaattgctccagcaacacctgttggttatttccacgaaatgcctgtccctgccagtcaatatctacatttgcgtccggttgttgcgtgatgttggcggtatcatcagcggcagctgcgccgtaaatttttgccggagccgttgccagaatttccacctcatcgccaacgcgaatcacgccgctattacgggcaattaaattctgaccaaaatcgacatcgccgttatcctgggcagtgcggaaagattgcaatgtttttaatggttcgcctgccggatgtttttgccctttttctgggctgacggtggtgaaaatacagcggctacaaggtttaaccacatcaaacaccacatcaccaatgcgaatcactttccagcgatcttcttcccaggctgacgcgccggaaaccaccagattggggcggaattgctccatttttacactggccggacaacgttgttggagatcacgtaacgaggcttcgttagcaagaaggtaaggatagccatcagcaaatgacagaggtacagtgttgtggcgtttcacgcgccgggtcatttgtggccccacccagcgtaattgcacttcgcgggagaaaaatccacttagccatttgttgatcgcgtctggcgcaattcgcgcggtaaaatgtgtgccccaaacttcggttggtgcgtcttgtgtggcgaaatcagcaaaacgaacatatgcgctactgccatctggtgcggtgagatgcaagccatcatgcacaggtgaaggagtaaaccgtaccatctggggaaactggcgagcggtaataaacgtaccgtcaggttccgtgatcataaagatgcgatcgaaggccagaccactgacatctgccagagcatgtgtaagaccaatgccgcgcatcgatttaacaggatgaataaaaagccggattaatgtcgccacggtgcggtcctcaaatgaaaataagccctcaactttatgacatgacgcgcttattagctataatgcgcaacaattttcttagcgcctgtcccattaggctattttatttgtcagtttggccctgggttatgctcgaaatcctcacgtacttgtgtacgctccggtttctccgcgctgtccatgtccagactgactgcaacaattacgcctactgcggtaggctcttagagtaaaagtgacgatatgaattctctgtttgccagtacggcccgtgggctggaagagctgttaaaaactgaactggaaaacctgggggccgttgaatgccaggtggttcagggtggggtccatttcaagggcgacacacggcttgtttaccagagcctgatgtggagccgcctggcctcgcgtattatgttgccgctgggcgagtgtaaggtttacagcgatttagacctctatctcggtgttcaggcgatcaactggacagagatgtttaatcctggcgcgaccttcgctgtccacttcagtggtttgaatgacaccatccgcaacagtcagtacggcgcgatgaaagtgaaagacgcgatcgtcgatgctttcacgcggaaaaatctgccgcgtccaaatgttgatcgcgatgcgccggatatccgcgttaacgtctggctgcataaagaaaccgccagtatcgctcttgatctgagtggtgatggtttacatctgcgtggctatcgcgatcgtgctggtattgcgccgatcaaagaaaccctggcagccgctattgtgatgcgatccggctggcagccaggaacaccgctgctcgatccgatgtgtggttccggtacgttgctgattgaagcagcgatgctggcgaccgatcgcgcaccaggcttgcaccgtgggcgttggggctttagcggctgggcgcagcatgatgaagctatctggcaggaagtgaaagcggaagcgcaaactcgcgcccgtaaaggcctggctgagtatagctctcatttttacggttcggacagcgacgcacgggtgattcaacgtgcacgcactaacgcccgtcttgcggggattggtgaactgatcacctttgaggtgaaagatgtcgcgcaactgaccaatccgctgccgaaagggccgtacggcacagtgttgagcaacccgccatacggggaacgtctggacagcgaaccggcgctgattgcgctgcatagcctgctgggtcggatcatgaaaaaccagtttggtggctggaatctctctttgtttagtgcctcgccggatctgctaagctgcttgcagctgcgtgcagacaaacagtacaaggcgaaaaacggcccgctggactgcgtacagaaaaattaccacgttgccgaaagcactccagacagcaaaccggcgatggtagcggaagactacaccaaccgcctgcgtaagaacctcaaaaaattcgagaagtgggctcgccaggaagggattgaatgttaccgcctgtatgacgccgatctgccagaatataacgttgccgttgaccgttatgccgactgggtggtggtgcaggagtatgcgccgccaaaaactattgatgctcacaaagcgcgtcagcgtctgttcgatattatcgctgcaaccatttcggtactggggattgcgccaaacaaactggtgctgaaaacccgtgaacgccagaagggcaaaaaccaataccagaaactgggcgagaagggcgagtttcttgaagttaccgaatataacgctcacttgtgggtgaacctgacggattatctcgatactggtctgttcctcgatcaccgcatcgcccgtcgtatgctcggtcagatgagcaaaggcaaagatttcctcaacctgttctcttataccggcagcgccaccgtgcatgcgggattaggcggtgcacgcagcaccaccaccgtggatatgtcgcgtacttatctggaatgggcagaacgcaacctgcgtctgaatggcctgaccgggcgtgcgcatcgcctgattcaggccgattgcctggcgtggctgcgtgaggcaaatgaacagttcgatctgatctttatcgatccgccaaccttctctaactcaaaacgaatggaagatgcgtttgatgttcagcgcgatcatctggcgctgatgaaagatttgaaacgtctgctgcgtgcaggtgggacgatcatgttctcgaacaacaaacgtggcttccgtatggatctcgacggcctggcaaaactgggactgaaagcacaagaaattacgcaaaaaacgctctcccaggatttcgcccgtaaccgccagatccacaactgctggctgattaccgcagcctgaaaggaatagtaatgtcattaatcagtatgcatggcgcatggctgtcgttcagcgacgcgccgcttctcgataacgcagaactgcatatcgaagataacgaacgtgtttgtctggtgggccgcaacggcgcaggcaaatcgacgttaatgaaaatcctcaaccgtgaacaagggctggatgacggtcgcattatttacgagcaagatttgattgtagcgcgtctgcaacaggatccgccgcgtaacgttgagggtagcgtttatgatttcgttgccgaaggcattgaagaacaagcggaatatctgaaacgctatcacgatatttcgcgcctggtgatgaacgacccgagcgagaaaaatctcaacgaactggcgaaggttcaggaacagctggatcaccacaacctgtggcagctggaaaaccgcatcaacgaagtgctggcgcaactggggttagatcctaacgttgcgctgtcgtcgctttccggcggctggttgcgtaaagcggcattaggacgcgcgctggtgagtaatccgcgcgtgctgttgcttgatgaaccgacaaaccacctggatattgaaaccatcgactggctggaagggtttttgaaaactttcaacgggacgattattttcatctcccacgaccgttcgtttatccgcaatatggcgacgcgcattgttgatctcgatcgcggcaagctggtgacctatccagggaattacgaccagtacctgctggaaaaagaagaagccctgcgcgtggaagaattacaaaatgccgagttcgatcgcaaactggcgcaggaagaggtgtggatccgccaggggatcaaagcacgccgtacccgtaatgaaggccgcgtacgcgccctgaaagcgatgcgtcgcgaacgtggtgaacgtcgcgaagtgatgggtaccgcaaagatgcaggtggaagaggccagccgctccggtaaaatcgttttcgaaatggaagacgtttgctaccaggttaacggtaagcaactggtgaaagatttttctgcccaggttctacgtggcgacaaaattgccctgattggtccgaatgggtgcggcaaaaccacgctgctaaaactgatgctcggtcagcttcaagcggacagcgggcgtattcacgttggcaccaaactggaagtggcttatttcgatcagcaccgcgcggaactggatcccgataaaacggtgatggataaccttgccgaaggtaagcaagaggtgatggttaacggcaagccacgccacgtattgggctatttgcaggactttctgttccatccgaaacgggcgatgacgccggtacgtgcgctttctggcggtgagcggaaccgcttgctgctggcgcgtttgttcctcaaaccaagcaacttattgattcttgacgaaccgaccaacgatcttgatgtcgaaacgctggaactgctggaagaactgatcgacagctatcagggcacggtattgctggttagccacgatcgtcagtttgtcgataacaccgttacagaatgttggatcttcgaaggcggcggtaaaattggtcgttatgtcggcggttatcatgatgcccgtggtcagcaagagcagtatgtggcgctcaaacagcctgcggtgaaaaaaaccgaagaagccgccgcggcaaaagcagaaactgtaaaacgcagcagtagcaaactaagctataaattgcagcgcgaactggagcagctaccgcaattgctcgaagatctggaggcgaagctggaagccctacagacgcaagtggcggatgcttccttcttcagtcagccgcatgagcagacgcaaaaagtgcttgctgatatggctgctgcagagcaggagctggagcaagcctttgaacgctgggagtatcttgaagcgttaaaaaatggtggctgatcgcaaaatagtcgatttaaacagagacagctgacaacggtaaaattgcctgatgaactgggtttatcaggcatgaaaaccaacactttgttagtcatctgtaaaatagcgcatcattaaggagtaccaatgtgcgaacatcatcatgccgcgaagcacatcctgtgctcgcagtgtgacatgctggtggcgttaccgcgccttgagcatggtcagaaagcggcatgtccccggtgtggcacaacgttaaccgtggcgtgggatgcccctcggcagcgtcccaccgcctatgcgttggctgcactgttcatgctgttgctgtccaacttgtttccttttgtgaatatgaacgttgcaggagttaccagtgaaattacattactggaaattcccggcgtgcttttttctgaggactacgccagcctcggcacctttttcctgttgtttgtgcaactggttcccgcgttttgtctgataaccattctgttactggtgaatcgcgcggaattaccggtccgtttaaaagagcaactggcacgggtgctttttcaactcaaaacctggggaatggcggagattttcctcgcgggtgtgctggtcagtttcgttaaactgatggcttacggcagcattggggtaggcagcagctttctcccctggtgtttattttgtgtcctgcaactgcgcgcttttcagtgcgttgatcgtcgctggttatgggacgacatcgccccgatgccagaactgcgccagccgctaaaaccaggcgtcacggggatacgtcaggggctgcgttcgtgctcctgttgtacggcaatccttcctgctgatgaacccgtgtgcccgcgttgtagtaccaaagggtacgttcggcgtagaaacagcctgcagtggacactcgcgctgcttgtaacgtccatcatgctgtatcttccggctaatattttgcccatcatggtgacggatttattaggctcgaagatgccgtcgacgattctcgctggggtcattctgttatggagcgaaggctcttatcccgtcgctgcggtgatctttctggccagtattatggtgccaacgttaaagatgatcgccatcgcgtggctgtgttgggatgccaaagggcatggcaagcgcgacagtgaaagaatgcatttgatttatgaagttgttgagtttgtaggccgctggtcgatgattgacgttttcgttatcgcggtgctctcggcgctggtgcgtatgggaggtttaatgagtatttatccggcaatgggtgcattaatgtttgctttagtcgtcataatgacaatgttttctgctatgacgtttgacccgcgtttgtcgtgggatcgtcaacctgaatcagagcatgaggagtcctgacagtatggaatctaataatggggaagccaaaatccagaaagtgaagaactggtctcccgtgtggatatttcctatcgtcacggcgctcattggggcctgggttcttttttatcattacagccatcagggaccggaagtgaccctgatcaccgcgaatgcggaaggaattgaaggtggcaaaaccaccattaaaagccgtagcgttgacgtcggcgtggttgaaagcgccacactggctgatgatttgacgcacgttgaaatcaaagcgcggctgaattccggtatggaaaaattgctgcataaagacaccgtcttttgggtggtgaaaccgcagattggtcgcgaagggattagcggcctgggaacgctgctgtctggagtttatatcgaactgcagccaggcgcgaaaggcagcaaaatggataaatacgatttgctggactcgccaccgttggccccgcctgatgcgaaaggtatccgtgtgattctcgatagcaaaaaagccgggcagctctcgccaggagatccggtgctgttccgtggctatcgggtaggttcggttgaaaccagcaccttcgatacacaaaaacgcaatatcagctatcaactgttcatcaatgcaccttatgaccgactggtgaccaacaatgttcgcttctggaaagatagtggcattgcggttgatctgacgtcagcagggatgcgtgtggagatgggctcattgacaacgctgctgagtggcggtgtcagctttgatgtgccggaaggtctggatttagggcagccagtggcaccgaaaacagctttcgttttgtatgatgatcagaagagcattcaggattcgttgtacaccgatcacattgattatctgatgttctttaaagattcggtacgcggtctgcaaccgggagctccggtagagttccggggtattcgcctgggtaccgtaagcaaagtgccattctttgcgccgaatatgcgtcagacatttaacgatgattaccgtattccggtactgattcgtatcgagccagagcggctgaaaatgcagcttggcgaaaatgcggatgttgttgagcaccttggcgaattgttgaaacgtggtttacgcggatcgctgaaaaccggaaacctggtcactggtgcactgtatgttgatctcgatttctatccaaatacgcctgcaataaccggtattcgtgaatttaatggttatcagattatcccgaccgttagcggcggcctggcgcaaatccagcaacgactgatggaagcgttggataagatcaacaaactgccattgaatccgatgattgaacaggcaaccagtacgctttctgaaagtcagcgcacaatgaaaaacctgcaaacgacgctggatagcatgaacaagatcctcgctagccagtcgatgcagcagttgccgacggatatgcagtcaacgttgcgtgaattgaatcgcagcatgcagggcttccagcctggctccgcagcctacaacaagatggtggcggatatgcagcgccttgatcaggtgttgcgagaactgcaaccggtgctgaaaacgctcaatgagaagagtaacgcgctggtatttgaagcgaaggacaaaaaagatccagagccgaagagggcgaaacaatgaaaaagtggctagtgacgattgcagcactgtggctggccggatgcagctccggcgaaattaataaaaactattaccagttacctgtggtgcagagcggtacacaaagtaccgccagccagggcaatcgtctgttatgggtagagcaggtcactgttcctgactatctggcggggaatggtgtggtttatcaaaccagtgatgtgaagtatgtgattgccaacaacaacttgtgggccagcccgttggatcaacagttgcgcaacaccctggttgccaacctgagtacgcaactgcccggctgggtggttgcctcccagcctctgggaagcgcccaggacacgctcaatgttaccgtaacggagtttaacggtcgctatgatggcaaggtcattgtcagtggtgagtggctgttgaaccaccagggacaactgatcaaacgtccgttccgtctggaaggagtgcaaactcaggatggttacgatgagatggttaaagtgctggccggtgtctggagtcaggaagccgcttctattgcacaagagataaagcgtctaccttaattataaagatttgtaaatataaccgtctccggtatgttgcctgaggcggtttttttgtctctaacgtgcggaaaaatttgttcctcttcacattttttgtacaaccgacatgcccgtgtagctcacaaatatgacagtggcgtgaattttgcgcattgacggcagttatgattcgcggtattgcttaactgtgattgcacatttagtaatcactgttttcttttccaccagaaaccagtatgagggaaacgaggcatgaagagacaaaaacgagatcgcctggaacgggcacatcaacgtggttatcaggccggcatcgccggacgctcaaaagaaatgtgtccctatcagacgctgaatcaaaggtcacaatggctgggaggctggcgagaagccatggcggacagggtagtaatggcctgattctgtctctttaaaaagaaacctccgcattgcggaggtttcgccttttgatactctgtctgattataatcagaaggcagacgtatcctggaacagaccgactttcaggtcgctggcggtatagatcagacgaccatcaaccagcacttcgccatccgccaggcccataatcagacgacggttaacaatgcgtttaaagtgaatacggtaggtcacttttttcgctgtcggcagtacctgaccagtgaatttcacttcgccaacgcccagcgcgcggcctttaccttcgccgcccagccagccgaggtagaaccctaccagctgccacattgcgtccaggcccaggcatcccggcataaccggatcgccaataaagtggcatccgaagaaccacagatccggattgatatccagttctgcttcaacataccctttgtcgaagttaccacccgtttcggtcattttgaccacacggtccatcatcagcatgttcggtgctggcaattgcgggcctttagcgccaaacagttcaccgcgaccagaggcaagaaggtcttcttttgtataggattcgcgtttatctaccatgttctctgtaagccttattttattgaagcacgcaggatagctaacacgtgtacgctgaacaagtccgatcagttcggaataaaccagttcagccaacgtaatggccatggaaaacggtgacgtccttcctgttgcgatgcttgcgcgatacgttcctggatggtttgcatcagcgtcgtttggccttcgccatcccacaccagatttaataataacggcagtgcgtcagtcacatcgtctactgcccagatggtgaatttgccttcttctaccgctttcaccagttcactgtgaagacttaaatggcgaacgttagctgtggggataatgacaccttgtttcccggttaactcacgttgctggcaaatagcaaagaagccttcgattttctcatttaaaccaccgaccggctgggcgcgaccgaactgatcgactgaacctgtgatagcgatactctgattcaccggcacatcggcgagggcgcttatcagggcgcagagttcagccatcgaggcactatctccatcaacttcactgtatgactgctcaaatgtcagcgatgctgagaaggggatctgttgctcaagctgtagttccgacatcaggaacgcttgcatgatcatcatccctttcgcatggatattgccgccaagctccgctttgcgttcgatgtcggtgaattcaccatcgccaatatgcacaacgcagctaatgcgagaaggttcgccaaaagcgcgtggatgacccggaaattcaatgaccgaaagggcgttaatttgcccgatgcgttcgccttcggtttcaatcaggatttgctcctgaaggatctcatcctgcatacgttcagcgaggaaaccttcgcgccattcacgctgctgcagcattaagtttagctgctcgccggagaaggtgtcgccatcacacagggaggcgacctctttacactggcggaggatccactgcgggctaagcggaagtgtttcttgttcaccggtgtagcgtgctgcttcgcggataagtatcggccaggcatccgctcccggtgcaggtaagtgattatgtctggcggtaaatgtcacccagcgacaccactgggttactgactccgcatcgacaatctgcagagtatcttcaaattcgctataaatagcctgctctgaaagctctggctccatctcctggaaatcagccaatgattcgcgttcgcctaccagaatgactttcagcttcaatggcatcgaaggcacagagacggggagagggcgcgactcatcaaacgcaacccagtcaaaacgctcgcggttaacgatatttttcagccgcatccacagcagaggttgcgccagcagtgtacgcaaagagataatgagaataccgccatttgcctgatgcaccagaccaggctgcagggtaatgtcgccattaaactggcgcaggcagccaaagagttgctccgcttctacccagtcggcagcgacaacttgcgttaaagtcgcaaaattatcatctgcactcactgcgtgacgtaagcggatggagtggccggaaacctcatagtgaccgcccaccagttggcctgcatcgctttgtagcgtacgcgcggcattggcaataagattcagatactcagactcttccggggccttcgccagcataaaagaggaggatgctcgcgtatgcagcaactgctccagcgcaaattgcagccgcggttgagtatcactgaataaaggatcgttttcgtcaatcaaatgtggctgagcaaatatttcctgatagctatcggtatcaggaaccaggtcacgccatgcaagtttcgtaatggtcaaagttgatgttttttagtctgttgtcaaagccgcgattataccgtaaccggcactacagcacacgtagaaagcaccgacaatactcctggcatgggcgttaaagctcacaggatggagattcttttcttcactggcctaaaaagctgatattctgtaaagagttacacggtaacattgagatcgctatgaaatatcaacaacttgaaaatcttgaaagcggttggaaatggaagtatctggttaagaagcatcgcgaaggggagttaatcacccgttacatagaagccagtgccgcccaggaagccgtcgatgtgttgctctcgctggaaaatgaacccgtgctggtaaatggctggattgacaagcatatgaatccggaactggtcaatcgcatgaagcaaaccattcgggcaagacgaaagcgccattttaatgcggaacaccagcatacgcgcaaaaaatcgatcgatctggaatttattgtctggcaacgtctggctggtcttgcgcagcgtcgcggtaaaacgctttctgaaacgattgttcagctgattgaagatgcggaaaacaaagagaaatacgcgaataaaatgtcttctctgaagcaggatctgcaggcattgctgggtaaggaataactgacgaaagtcagttcaatttactaaaggcaaaaaaaaccccgcagcagcggggtttttctaccagacgagaacttaagcctgcggctgagttacaacgtctttgatacctttaacttcgatctctacgcgacgatccggagccaggcagtcgatcagtgcagcacgctgtttcacgttgtcacaggtgttgccagtaaccgggttggattcgcccataccacgtgcggagatcttgtctgccgggatacctttggagatcaggtaatcaacaacagactgagcacggcgctcggacagaccctggttgtaagcgtcagaaccgatgcggtcggtgtaacccagaacaactacggaaccgtctttcggatccaggttgctcagctggctgtacagctgatccagagcagcctgaccttccggtttcagggttgctttgttgaagttgaacagaacgtcagacttcagagtgaagtgcttggtctgtacttccggtgccggagctggagccggagcaactactggagctgcttcgccctgaccgaaacggtaggaaacacccaggctcagcatgccgttgtccggacgagtgccgatggtgtgtgcgtcaccgatgttgttggtccactggtattccagacgggtagcgatttcaggagtgatcgcgtactcaacaccgccagcgaagaccggagaaacgccggtgtcgtggtttttaccataaacgttggatttagtgtctgcacgccataccatgccacccagacgagtgtagatgtccaggtcgtcagtgattgggtaacccagtttagcggtcagttgaacgccctgagctttgtatgcaccgttttcaacgctgcctttgtacggcatacgacctaaccagtcgtaacccatttcaaagccaacatacgggttaacctggtaaccaccaaaagcaccagcgcccagttggttttcatgggtcgggccattgttgttgatgaaaccagtgtcatggtactgggaccagcccagtttagcaccagtgtaccaggtgttatctttcggagcggcctgcgctacggtagcgaaaccagccagtgccactgcaatcgcgatagctgtctttttcattttttgcgcctcgttatcatccaaaatacgccatgaatatctccaacgagataacacggttaaatccttcaccgggggatctgctcaatattaactctaccgatatcttcggcttatgccgagcacccctggcgatgtaaagtctacaacgtagttgaaaacttacaagtgtgaactccgtcaggcatatgaaaaaaaagtcttgtataaggtatgtttaatcttttttgtcagcgacaatttacagaagagaatcgcggaaaccgcttcagacaagcctccgcaaggaaaattagtcacgactgaaagcattggctgggcgacaaaaaaagttccaggattaatcctaaatttacttaatgatacaaattagagtgaatttttagcccggaaagttgtctcgtggcgtgagaggatgcgcttaccggacgcataataaaccccatagcgttaccttcatttgccgcatcaacaagttcagcatgctcttcttcagtcaaatcatctgccaaccaaccgatcaccacactgtaattgcccgtgcgtaaagcgcgaaccattgactccacagtgtggcaaggggagagctggctaatctgcattactttcgttaagggtagcccagatgcctgaacccattcccgactcagtttttgttgcggtgttaaccagagttgccagcgcgattgctgaccgagttgctgtaacaatggcaacagtagaagttgcgtcatcatgggctgatcttcgcgatagacaacttcactgataagcccggctgtagtgttttccgtagagacacgcgcaattttacttgctgcggatgagaacgacgaagaacgatgtgcatagcctgaagtgtacataatcaatccagcccctgtgagttactgtatggatgtacagtacatccagtgacaacaaagatcaaccctattttcggaaagagcctcgcaaattttgtcgttggtgacgggaaaacataaattaatcttgccccttaagaataagttgcctattttcgtagttaacggatccgttaatgtgaatcattcttttatgttatgattttaaaaggaattttatgaaaagcctctcctataagcggatctataaatcacaagaatacctggcaacgttgggcacaattgaataccgatcattgtttggcagttacagcctgaccgttgacgacacggtgtttgcgatggtttctgatggtgagttgtatcttcgggcttgtgagcaaagtgcacagtactgtgtaaaacatccgcctgtctggctgacatataaaaagtgtggccgatccgttaccctcaattactatcgggttgatgaaagtctatggcgaaatcaactgaagctggtgcgtctgtcgaaatattctctcgatgcagcgctgaaagagaaaagcacgcgcaatacccgggaaagactgaaagatttgcccaatatgtcttttcatctggaagcgattctcggggaggtggggattaaggatgtacgggcgttacgtatacttggggcaaaaatgtgttggttgcgactgcggcagcaaaacagtctggtgacagaaaagattctgtttatgcttgaaggtgccattatcggcattcatgaagctgcgctcccggtggcacgccgccaggagcttgcagaatgggctgactctcttacgccgaaacaggagtttcctgcggaacttgagtaatctggcgttgcagacgaccaatctcaggcagtaatgcaatcaataatccaacttgttgtacgaccagaggttctttgctgtctgcccgtggttcaagttgctgcatccgctgtttcaggctagctaatgcctcattgacgcgttcttcatcagcaggttgatgatgtaacgcgtcatcaacatagcaaactgcgtcatcaagaaacgccagaatttcaggattagttaactgctcccggtgagcaccgagggctgagatatagctggtaaacgtatggttaaggcacagcaaccgaaacgcggcttcgcgaatttgcggggtaacgttcggctcgctggacatatttgataccaccgacgccagctcagcatcacggttgtgtgcatcgcggcgggcaatacgatacgccagacggttatcacgcccctgatggtattgctccagtatggcatcgagataccgacagttggcctctgtggcgcgttcgagcatgcgcggcagattgcgaaactgccagtcaggccagatgtagctcactgccgcccacgcaatggcacaaccaatcagcgtatcgattacgcgaggtaacgctacttcaaaaccttcacccagtaagttaaaacacagtagcaccaaaagtgtgatgaacatcgttgcatgagcgtattgcacgttacggaaggcaaaaaagagcacgccggtaataaccagcagcaccagctgcccttccagtgatggcacaaaccacagcacaggaatgccaatggcgatacctaccagcgtaccaataatccttaacttcaggcggtggcgcgtggcgttatagtttggctggcagacaaacaaacttgtcagcaagatccaatacccgtgatgcattccggttatctgaatgatggcgtagccgaagcacaacaccagcgacattcttaccgcatgacggaagagggcggattccggcgtgaagtgacggctaagacgcagccagatatcactcaacccgtgcgggctgtcatcagcgagctcattttcgtcattattatggggtagtgcctgggcctgttctgattcaattgttgccagttgggcatcaatggcgcgtaaattgttcagcaaaaatcccagtgttttgagtaaatcggcgggtgcgccgttatcgcgcatccgctccagcgcagcatcaatatgcgtaaaagcgcgctcaaaatgcggatcatgttgataaggctgacgcaacaaaatacagcgtgacagttgctggcacgcctggccctgcatcgacatcagccgctgaaaacggaacagcacgtcgctgtggcgaaaatgttcacgcaatgtttgatactgaatatgagaagagctggcacgctcgtgaatatcctgtgcgacaaagtaataatgcagcgtgcgacgcgttccccgttgaccacgatcgccacgtaagcgggtcagcagcgagagtttcgtctgattcaatgtcgccatcagcagaccgttggcgagagccaaatcgtacagcggtgcctggctttgatcttcaatatcaggatcaaacatgcgcgacttgagctcaagataacgcgccagttgttcatagcaacgcgccaggttgtcctgcagcgggcggaccgggaacagcagatgaccaataagtgtcaggacgttgtaccagacggcaccggccagcagatacatcggctgctgataccagtgctcatacagtgatgttcccaacatagtgtaaatggcgatcagcaatgcaccgaaggcaattgttgcatagcgttgacccagaccgccgagcaaaatgaagccgctggtagagagcgttaagccaatcgcaaatagccagggccagggaaacagcaattctactgaggccgaggcgataaaaaagcagaacagcgtaatgatgaggttacgcaaacgtcccgccagtcggtcatcgagatcggtcagcgccgctgccaccatccccagcgttagcggaatcgtcagttttacatcacccagccaccacggaaacgctgtggttccacaaagcgcaataaaaatacgcgcgtaatacagccaggcgctgttccaggtatagcgtttgagcaaaggacttagcataaaggccatattagtggattattcaaaacgacgacgtgcattggcttcacgcgcagcttgcgctgtttctaccgataccacgcgacgaccaaccggccatagtgcaatagcggcaattttaaagttcgcaatgccgacaggaatgccaatgattgaaatacattgtgcgatgcccgttgcaatgtgcatcaggcataaccaccagccaaagaaaatcagccagaaaatattcaataccgtaccgccagtattcagcagcacatttttgccagccgggttcagttcatcgacatgaatagcttcattgccataaggcaccagagacagtttagtgatctcccagcaggatcgtgtcagcggtaaggtaaaaatcagcacaatactgaccagagtcgccaacagccagcccagagtggtggcaaatccgccaagcacaaagttcagaatgttcaaaacggtacgcataaaacctcgctttactgtggttttcagtaatgggcggcaattgtaacgtttttttgggctggagcacgttttctctgacggttacactgataagaaataatttcgtgtggatctacagagtcatggaactgaaagcgacaacgcttggaaaacgtctggcacagcacccttacgatcgggcggtgatcctcaatgccgggattaaagtctccggcgatcgccacgaataccttattcctttcaatcaattactggcgattcactgtaagcgcggtctggtatggggcgagctggaatttgtactgccggacgaaaaagtggtgcgtctgcacggcaccgaatggggcgagacgcagcgtttttaccatcatcttgatgctcactggcggcggtggagtggcgagatgagcgaaattgcgtctggtgttttacgccagcaactggatttgattgccacgcgcactggggaaaataaatggctgacgcgtgagcaaacctctggcgtgcagcaacaaatccgccaggctttgtcggcgttgccgttgccggttaaccgactggaagaattcgataactgccgtgaggcgtggcgtaaatgtcaggcctggttgaaagatattgaaagcgctcggttgcagcataaccaggcgtataccgaagccatgcttaccgagtatgcggattttttccgccaggtcgagtcttcaccgctgaatccggcgcaggcccgggcagtcgttaatggcgagcattctctgttagtgctggcaggtgcaggaagcggaaaaacgtcggtgctggtggcccgtgcaggctggttgctggcgcgtggtgaagcgtcccctgagcaaattttattgctggcgtttggtcgcaaagccgctgaagagatggacgagcggattcgcgaacggctacataccgaagacattaccgcacgcacgtttcatgcgctggcgctgcatattattcagcagggcagcaaaaaagttccgatagtcagcaaactggaaaatgataccgctgcccgtcatgaactctttattgctgagtggcgcaagcaatgcagcgaaaagaaagcgcaggcgaagggctggcggcaatggctgacggaagaaatgcagtggtcagtgccagaaggtaacttctgggatgatgaaaaattacagcgtcgccttgcctctcgcctcgatcgctgggtaagtctgatgcggatgcacggtggtgcacaggcagaaatgattgccagtgcacccgaagagattcgcgatctgttcagtaaacgtatcaagttgatggccccgttattaaaagcctggaaaggtgcgctgaaggcagaaaacgctgtcgatttttcgggccttattcatcaggcgattgtgattctggagaaaggtcgctttatcagcccgtggaagcatattctggttgatgaatttcaggatatctcgccgcagcgggcagcgttgttagcggcattacgcaagcaaaacagtcagacgacgttgttcgctgttggtgatgactggcaggcgatttaccgattcagcggtgcgcaaatgtcgctcaccaccgctttccatgaaaactttggtgaaggcgaacgctgtgatttagacacgacttaccgttttaacagtcgtatcggtgaggtggcaaaccggtttattcagcagaacccaggccagctgaaaaagccgctaaacagcttaaccaatggagacaaaaaagccgtcacgttattggatgagagtcaacttgacgctttgctggataagctctctggttatgccaaaccggaagagcgcattctgatcctggcgcgttaccatcacatgaggcctgccagcctggaaaaagcggcaacacgctggccgaagttgcaaatcgactttatgaccattcatgccagcaaagggcaacaggcggattacgtcatcatcgttggcttgcaggagggaagtgatggttttccggctgcggcgcgggagtcgattatggaagaggcgctactgccaccggttgaggatttcccggacgctgaagaacggcggttaatgtacgtggcgctgacccgggcacgccatcgggtatgggcactgtttaacaaagagaatccctctccctttgtggaaatactgaaaaatctggatgtgccggtggcgagaaaaccgtaagaaacaggtggcgtttgccacctgtgcaatattacttcagacggtccgcgagataacgctgataatcggggatcagaatatcgaccgcgtcgttgaaatgcggcgactggattatgaagtctgccgttgccacgttggtggcgaccggaatgttccataccgtcgccagacgcagcaaggctttcacgtcaggatcgtgcggcacggcatttagtggatcccagaagaaaatcaatacatcaattttcccttctgagatcaatgcgccaacctgctggtcaccccccattgggccactcaacatcgcgttgacgttcatgccggtcgcgcgggaaattaagttaccggtagtgcctgttgcatacagtacgtgttgttccagtaacggttgatgccgttccacccagctcatcagcatttgtttgcagtgatcgtgtgccaccagcgcaatatgtttccgcgcaggtaaagtgcgagtcgtcagttccataatgtacatccgtagttaactttcctacagattactgtaagcacttatcgctgcaagataaagaccgaaaaagcctgcgcacaggcacaaaaatctcaggaagatggttgtttttccgcccactgcaggaaagtatttcgcgtttgtgggtcagccagtttaaaccaatacttcagccgttgttctgtgagcacctgagactgcggtggaatagcatccagctcggaaacacccgaaagcagcgtactgtcatctgccatcatcgtggcaaattgcggtagtgaagcgcgtttcgcggatttgttatagcgttcaacctcgacctcataatcaatcgtttttgccgttgaggtaatggcgagaatatccagctttaccggaatcggcgtcgcatcgccatccaacaattcaaggcgcggcgcggcatcaaaatggttagcttcccgctcattctccaggcgaggcaggcgaaaattgacctggttgatgagctgggtattaaaactgaccaccagcggtggggagatatacagccgttcttcactattggaaagatgaatcgtcttctcaacgcgaaacactaactgatgcggtccattatccagttcaatgctgtccgcaccgcgcagcagagagctggaaaccttcttgccgtcgagtaccagaagatcgacatcggttgaaagccgcagcgtggtggcaaaaacggataccggcaaacataatgcaatcaaggtggtcacgatgccggttttcataggtagctcctgtcaaaagaccgcccgaataataatgtgtcaaaatttttctttaatcatacttactaacatatagacatatttcccgcttttgctctcattcattcgtattagctgcatggttggcatgtcggctttgtcgtacactttgttaaacagtctggaggaaataatgaaagaaaccgatattgcaggcattttaacgtccactcacaccattgcgctggtgggggcaagcgacaaacccgatcgtcccagctatcgcgtgatgaaatatctactcgaccaggggtatcacgtcattccggtttcgccaaaagttgccggcaaaacgctgctgggccagaaggggtatggcacgctggcagacgttccggaaaaagtcgatatggtcgatgttttccgtaattcagaagcggcgtggggcgtggcacaggaagctattgccattggcgcgaaaactctctggatgcaactgggggtgattaatgagcaagcggcagtactggcacgggatgccgggttaaatgtggtgatggatcgctgcccggctattgagatccctcgcctgggcctggccaaataaaaaatccccggaaggcaaaaaccttccggggatttgttcagggattagttacgcagacgcggggcctggagttgtttgcggatggtctgcgccagctcatccatggatggctgttcaggatgttcatcctgcaattcgctacttagctgggcttcagccaggtaggtatgaaccggtaggccgttatcgtcctccatcactacgtgataccacggagcggcgcgaagctcgtcattcaccgccagctcatcaggcgacggttcagagagcgaataaaccgggtcgatatccacgaccactccgagataacctaacagggaatggcggacctgctggccgataccgaatttgctggcaatcatagtcacctcccgggaaatctttacctttgatataagggtaaaattccacatttcaagttacatgacgcgacaggcaaaccctttcagatatagcccttccggataggtagcgatcaccggatgatcggctgcctgacggaactgctctataaattgtacatcacgaccggcatcaattgcggcatccgcgatgattttctgaaataaatcgctggtcatcagaccggaacaggagaaagtcaggagaataccgccttcattcagcagctgaatcgccagcatgttgatgtctttataaccacgacacgcgcccatcaactggcttttattctcaacaaacttcggcgggtccatcacgataacgtcaaatttttcaccgcgatcgcgataagtacgcagcaatttaaagacatcatcacggacaaactcagccttgctcagatccagtttgttcagctcaacgttctgccgtgcaatatccagcgcttcctgggaggtatcaacgctgacaacctggctgcaaccgcccatcagtgccgatacggcgaaaccaccggtataggagaaacagttcagcacacgtttattttcaacgtagcggcgggtagccaggcggctatcacgctggtccaggtagtagcccgttttgtgtccgtgctgaatatccaccagcagtttcattccgtgttcttcaatcggcagcagggcaggtggcaactcgccggtgacggggccctgggtcagctccattccttcttttttacgtaccgcgacgtcgctgcgatcgtaaatcgaacattccgggtacagcgtttgcagggcactaattaatgccgcgcgctgatattctgccccagcactcagcagttgcagcaccagaaaattaccgaaacgatcgatagtaatacccggcaggccatcagattctccggcgattaaacgatagctgtcgaggccatctttttgcgccagccagtcacgccatttttgtgcttgttgcaaacggcgggaaaaaaaagcaatgtcgatagactcagacgggtcaaacgtccagacgcgcgcccggatttgcgaagctggcgaataagcgccgcgtgctaaccattttccctgatgatcaacaatatcgatggtttcaccgaggctggctttaccttccatgcgggcaacggccccggaaaagacccacggatggcgacgaagtaatgatttttcgcgccctttggctaacactaaacgtacactcataatttacttttctgtcgatgcaaagaaatgggcgtcattgtccggagttttccatggatttgcaacgcgtccattaaggataaggagagcagcaatgtcgaaagtctgcataattgcctgggtttacgggcgagttcagggcgtaggatttcgctacaccacacagtacgaagcgaaaagactgggtttaaccgggtacgccaaaaatcttgacgatggcagcgtggaagtggttgcttgcggtgaagaagggcaggtggaaaaattaatgcagtggttaaagagtggcggcccgcgttctgcgcgtgtagaacgggtgctcagcgagccgcatcatccctcgggggaattaaccgattttcgtatccgttaaatacattttaccggttttggcaggccagcaattttggtggcttgcttagccggacctttcggaaacagtcggtataaatagcggctgttacctttttcttcgccaaatttattcgccatcgcttttaccagcatacgaatcgccggagaagtattgaattccagatagaaatcacgcacaaaacgcaccacttcccagtgttccggtgacagcgaaatcccttcgttctctgcaatcaccacagccagcggctcactccactggctgctttctttgagatagccttcggtatccgtttctatctctttaccttcgaagatcagcataattattactaccttaatcagactggcggcagtgtaacaaaaaacaaagccccgcataaagcgaggctatgaaagtgttagcgggtgagattaatcgcggctagcgaagcccagaatgctcagcaggctgacgaagatgttgtacagcgaaacatacaggctaaccgtggcacgaatatagttcgtctcaccgccatgaatgatgttgctggtttcaaacaagatagcgccagaggagatcagaatgaagaccgcgctgatcgccagatgcagagcaggcagctgcaggaagatattcgcaaccataccaatcagcaccaccacaatacccgccatcagcataccgccgaggaacgacatatctttgcgggtggtcagcacatatgcagagcagcagaagaacactaacgccgttccgcccagtgccatagcgattacgtcacccattccggcagacagataggtgttcagaataggtccgaggatataacccagaaaaccggtaaaggcgaatgcggagataatcccggtcggcttattcgccgttttataggtcaggaacatcaaaccatacatacccaccagcgtcagaatcagacccggagatggcagcatcagcaccgtactggcagttgcggtaatcgccgaaaaggccagcgtcaggctcagcagaaaataggtattacgcagcaccttatgggtgctaagcagtgatgtacggtcatgtgaagaactaacaatacgatccattgagtcactctctatgacagatgtaattaattaagcagcataatgataatgcgtaagggcacccagaagttttacccatctttacgcatttgatctggaacaggtttaacagcggattatcaggtcattaagcaaatataacgccctgagaatttcgacaggcaaaagaaaaaggggttagcatttagctaaccccttatcttatttggcggaagcgcagagattcgaactctggaaccctttcgggtcgccggttttcaagaccggtgccttcaaccgctcggccacacttccggaatgacgcgcactataaacatcccgatgcggcgtgtaaacccctaatttgtttgtttgcctgaaaaacagccaaaagtgcattgatagcgtgaaataacagcagattgatcatttcatcaccatgaattccttctcttttactcgtttagcaaccggctaaacatccccaccgcccggccaaaagaaaaataggtccatttttatcgctaaaagataaatccacacagtttgtattgttttgtgcaaaagtttcactacgctttattaacaatactttctggcgacgtgcgccagtgcagaaggatgagctttcgttttcagcatctcacgtgaagcgatggtttgccttgctacagggacgtcgcttgccgaccataagcgcccggtgtcctgccggtgtcgcaaggaggagagacgtgcgatatgaataacgaggaaacattttaccaggccatgcggcgtcagggcgttacccggcgcagctttctcaaatattgtagtctggctgccacgtcgctgggattaggcgcgggaatggcaccaaagattgcctgggcgctggagaacaaaccgcgcattccggtggtatggatccacggtctggaatgcacctgctgtaccgaatcttttatccgctccgctcacccactggcgaaggacgtcatcctttccctgatttccctcgattacgacgatactttgatggctgccgccggaacccaggcggaagaagtctttgaagacatcatcacgcaatacaatggcaaatatatcctcgcagtagaaggtaatccgccgctgggcgagcaggggatgttctgtatcagcagcggtcgaccgtttattgagaaactcaaacgtgccgctgccggagccagcgcgattatcgcctggggaacctgcgcgtcctggggctgcgtgcaggccgcgcgacccaatccgacgcaggcaacgcctatcgacaaagtcatcaccgacaaacccattatcaaagtacctggctgcccgccgatcccggatgtgatgagcgccatcattacttacatggtgacctttgatcgcttgccagatgtcgacagaatgggccgtccgctgatgttctatggtcagcgaatccacgataaatgctatcgccgcgcccacttcgacgccggagagttcgtccagagttgggatgatgacgctgcccgcaaaggttactgcctgtacaaaatgggctgcaaagggcctaccacctataacgcctgttcctccacacgctggaatgatggcgtttctttcccaatccagtctggtcacggctgcctgggctgtgcggaaaatggtttctgggatcgcggttcgttctacagccgcgtggtcgatattccgcaaatgggtactcattccaccgccgataccgtcggtttaaccgcgcttggcgtggtggcagcggctgttggtgtgcacgcagtcgccagcgccgttgaccagcgcagacgtcataaccagcaacctacagaaaccgaacatcagccaggcaatgaggataaacaggcatgagcactcagtacgaaactcagggatacaccatcaataatgccggacgccgcctggtggtcgacccgattacgcgcatcgaaggccacatgcgctgcgaagtgaatattaacgatcagaatgtgatcaccaatgccgtctcctgcggcaccatgtttcgcgggctggagatcatcctacaagggcgcgacccgcgcgatgcgtgggcgttcgttgaacgtatctgcggcgtctgtactggcgtacacgccctggcttcggtttacgccatcgaagatgctatcggtattaaagtgccggacaacgccaatatcatccgcaacattatgctggcaacgctctggtgccacgatcatctggtgcacttctatcagcttgccgggatggactggatcgatgtgttagatgcgctgaaagccgacccgcggaaaacctccgaactggcgcaaagtctctcctcttggccgaaatcatcccctggctatttcttcgacgtacaaaaccgcctgaaaaaatttgttgaaggcgggcagttggggatcttccgcaatggctactgggggcacccgcagtacaaactgccgccagaagctaacctgatgggctttgcccactatctcgaagctctcgatttccagcgtgaaattgtcaaaatccacgcggtctttggcggtaaaaacccgcatccaaactggattgtcggcgggatgccttgcgccatcaacattgacgaaagcggcgcggtcggggcagtcaatatggaacgcctgaacctggtgcagtcaattatcacccgcacggcggacttcattaacaacgtgatgatccccgacgccttagccatcggtcagttcaacaaaccgtggagcgaaatcggcactggtctttctgataaatgcgttctcagctacggcgcattcccggatattgccaacgactttggcgagaaaagtctgctgatgcctggcggcgcggtgattaacggcgacttcaacaatgtgctgccagtggatttggttgatccgcagcaggtgcaggagtttgtcgaccacgcctggtatcgatatcccaacgatcaggtcgggcgtcatccgttcgatggcatcaccgacccgtggtacaaccccggcgatgtcaaaggcagcgataccaacattcagcagctgaatgaacaggaacgctactcgtggatcaaagcgccacgctggcgcggtaacgcgatggaagtggggccgctggcgcgcacgttaatcgcttatcacaaaggcgatgctgcgaccgttgagtcggtcgatcgcatgatgtcggcgttgaacctgccgctttccggtatccagtcaacgttaggccgcattttgtgccgcgcgcacgaagcgcagtgggccgcaggtaagttgcagtatttcttcgacaagctgatgaccaacctgaaaaacggcaatctcgccactgcttccacggaaaaatgggaacctgcaacctggccgacagagtgccgtggtgtcggttttaccgaagcgccgcgcggggcgttaggccactgggccgccattcgcgatggcaagattgatctctaccagtgcgtggtgccgaccacctggaacgccagcccgcgcgatcccaaagggcagattggcgcttatgaagcggcgctgatgaacaccaaaatggcgatccccgagcaaccgctggagatcctgcgtactctgcacagctttgacccgtgcctcgcctgttcaacacacgtgctgggcgacgacggtagcgagctgatctccgtgcaggtgcgttaacagcgaaggagaatcatcatgcaacagaaaagcgacaacgttgtcagccactatgtctttgaagcgccagtgcgcatctggcactggttgacggtgttatgcatggcggtgttgatggtcaccggatactttatcggcaagccgctaccttccgtcagcggcgaggcgacgtatctgttctatatgggctacatcaggttaattcacttcagcgccgggatggtttttaccgtggttttgctgatgcggatctactgggcttttgttggcaatcgatactcccgcgagctgtttatcgtgccggtatggcgtaaaagctggtggcagggcgtgtggtatgaaatccgctggtatctgtttctggcaaaacgtccgagtgccgatataggccataatcccatcgcccaggcggcgatgttcggctatttcctgatgtcggtctttatgatcatcactggttttgcgctgtacagcgaacacagccagtacgctatttttgcgccgttccgttatgtggtggaatttttctactggacgggtggcaactcaatggacattcacagctggcatcggctggggatgtggctgattggcgcgtttgtgatcggtcatgtctacatggcgctgcgtgaagacatcatgtccgacgacacggtgatctccaccatggtcaacggctaccgtagccacaaatttggcaaaataagtaacaaggagcgttcatgagcgagcaacgcgtggtggtcatggggctgggcaacctgctgtgggccgatgaaggcttcggcgtgcgggtggcggaacggctgtatgcccattaccactggcccgagtatgtggagattgtcgatggcggtactcagggactgaacttgctggggtatgtcgaaagcgccagccatctgttgattctcgatgccattgactacgggctggaacctggaacgctgcgaacctatgccggagaacgcattccggcttatctcagcgcgaagaaaatgagcctgcatcagaacagtttctccgaagtgttggcgctggcggatatccgcggacatctgccagcacatattgccctcgtcggtctgcaacccgcaatgctcgacgactacggcggtagcctgagcgaactggcacgggagcaactgcccgctgcggaacaggcggcgctggcgcagcttgctgcgtggggaattgtgccgcaaccggctaatgaatcgcgctgtctcaattatgactgtctgtcgatggaaaattacgaaggcgttcgcttgcgccagtaccggatgacacaggaggagcagggatgagcaacgacacgccatttgatgcgttgtggcaacgaatgctggcgcgcggctggacgccagtcagtgaatcccgtcttgacgactggcttacgcaagcgccagacggcgtggtgttattaagcagtgacccgaaacgcacgccagaggtcagcgataatccggtaatgattggcgaattactgcgcgagtttcccgactatacatggcaggtggcgattgctgaccttgagcagagcgaagccatcggcgatcgctttggcgtctttcgctttcctgccactttagtgtttaccggcggaaactatcgcggcgtgctgaatggtattcacccgtgggcggaactgataaacctgatgcgcgggcttgtcgaaccgcagcaggagcgtgcctcatgagcgaaacttttttccatctgctggggccaggaacgcaaccgaacgatgacagtttcagcatgaatccactgccgatcacctgtcaggtgaatgatgaaccgagtatggcggccctggagcaatgtgctcacagcccgcaggtgattgcgctgttaaacgagttacaacatcaactaagcgaacgccaaccgccgttgggcgaggtgctggcagtcgatctgttaaatctcaacgccgacgatcgtcactttatcaatacgcttctcggggaaggggaagtgtcagtgcgcattcagcaggctgacgacagtgaaagtgaaatacaggaggcgatcttctgcggattatggcgggtgcgcagacgtcgcggcgaaaagttgctggaggacaaactggaggctggctgcgcgccgctggcgttgtggcaggcggcaacgcaaaatctcttgccgacagattcgctgttaccgccgcccattgatggcctgatgaatggcctaccgttggcgcatgagttactggcacatgtacgtaaccccgacgcgcagccgcacagcattaatctgacgcaattacccatcagcgaggctgatcggctttttctctcacgtctctgtgggccgggaaatattcagattcgtaccattggctatggcgagagctatatcaacgccacggggttacgccatgtctggcatttacgctgtacggacaccttaaaaggcccgttactggaaagttatgaaatctgcccaataccggaagtggtgctggcagcgccagaagatttggtcgactctgcgcagcggcttagcgaggtatgtcagtggctggcggaagctgcaccgacgtaaaaagacggtaagtatcgctttcagtcttatgaatatcgcaatcggcgaatacctctggtcgtagagtttcaggataaagagggagatctaccattatcgggttatttttctctcttcgcctacaggagtgcgcatgtgggatgtcattgatttatcgcgctggcagtttgctctgaccgcgctgtatcactttttatttgtaccccttaccctggggctgatttttttgctggctattatggaaaccatttacgtggtcaccggcaaaacaatctaccgcgatatgacgcgcttctggggtaagctcttcggtatcaattttgctcttggcgtggctaccggcctgaccatggagtttcagtttggtactaactggtcattctattccaactatgtgggcgatatttttggcgcaccgctggcgatggaagcattaatggccttcttcctcgaatccacctttgtcgggctgttcttcttcggctggcaacggctgaataaataccagcacctgctggtgacgtggctggtggcgttcggttcaaatctctctgcgttgtggatattgaatgccaacggttggatgcaatacccgaccggtgcgcattttgatatcgacaccctgcgtatggagatgaccagcttcagcgagctggtctttaatccggtcagccaggtgaaatttgtgcacaccgtaatggcgggctacgtgaccggggccatgtttattatggcgatcagcgcctggtatttactgcgcggacgggagcgcaatgtcgcattacgctcgtttgccatcggttccgtcttcggtactctggcgattatcggtaccctgcaactcggagacagttctgcgtatgaagtcgcgcaagtacaaccggtaaaactggcggcgatggaaggggagtggcaaacggaacctgcacctgcaccgttccatgtggttgcctggccggaacaggatcaagagcgtaacgcctttgccctcaaaattcccgcgctgctagggatcctcgccactcactcattagataaacccgtgccgggtctgaagaatttgatggctgaaacctacccacgcttgcaacgcggacgtatggcctggctgttaatgcaggaaatatcgcaaggcaatcgtgagccgcatgtgttgcaggcattccggggactggaaggtgacctgggctacggcatgttgctctcccgctatgcgccggatatgaatcatgtcacagccgcacagtaccaggcggcgatgcgtggcgcgatacctcaggttgcgccggtattctggagtttccgcatcatggtgggctgtggttccctgctgctactggtgatgctgattgcgcttgtccagacgctgcgtggcaaaatcgaccagcatcgctgggtgctgaaaatggcgctctggagtttgccgttgccgtggattgcgattgaagccgggtggtttatgaccgagtttggtcgtcagccgtgggcgatacaggacatcttaccgacatactccgcgcactccgctttaaccacaggacaactggctttctcactgatcatgatcgtagggctttacaccctgttcttaatcgccgaagtctacctgatgcagaaatatgcccgtctggggccgagcgcgatgcagagtgaacaaccgacgcagcaacaggggtaaaggagaaaatcatgtttgattatgaaacattgcgcttcatctggtggctgctgattggcgtgatcctggtggtctttatgatctccgacggatttgacatggggatcggctgtctgctgccgctggtggcgcgtaatgatgatgaacgccggatagtgataaacagcgttggtgcacactgggaaggcaaccaggtctggttgatcctcgctggtggggcattatttgccgcctggcccagagtgtatgcagcggcgttttccggcttttatgtggcgatgatcctggtgctgtgctcactgttcttccgcccgctggcctttgattatcgcggaaaaatcgccgatgcacgctggcgtaaaatgtgggacgccggtctggtcatcggcagtctggtgccgccggtagtcttcggtatcgccttcggcaacttgttgctcggcgtgccgtttgccttcacaccgcaattacgcgtggagtatctcggcagcttctggcaactgctgacgccattccctttattgtgcggattgctcagccttgggatggtgattttgcaaggtggcgtctggttacaactgaaaactgttggtgtgattcatctgcgttcacagctggcgaccaaacgcgctgcactgttggtgatgctgtgctttttgctggcgggttactggctgtgggtcggtattgatggctttgtactgctcgcccaggatgctaacggtccttccaatccgttaatgaaactggtggcagtgctacctggtgcctggatgaataattttgtcgagtcgcccgttttgtggatcttcccgctgctgggattcttctgcccattgctgacggtgatggcgatttatcgtggtcgcccgggttggggatttttgatggcatcattgatgcaatttggcgtgattttcacggcaggcatcacgctgttcccctttgtcatgccgtcaagcgtgagtccgatctccagcctgacgttgtgggacagtacttccagtcagctgacgctgagcattatgttggtaatcgtgctgatatttttgcccattgtgttgctctacactctctggagctactacaaaatgtgggggcgcatgacaacagaaactctccgccgtaacgaaaacgagttgtactaaggagcagaaacaatgtggtatttactttggttcgtcggcattttgttgatgtgttcgctctccacccttgtgttggtatggctggacccgcgtctgaaaagttaacgaacgtaggcctgatgcggcgcattagcatcgcatcaggcaatcaataatgtcagatatgaaaagcggaaacatatcgatgaaagcgatcttaatcccatttttatctcttctgattccgttaaccccgcaatctgcattcgctcagagtgagccggagctgaagctggaaagtgtggtgattgtcagtcgtcatggtgtgcgtgctccaaccaaggccacgcaactgatgcaggatgtcaccccagacgcatggccaacctggccggtaaaactgggttggctgacaccgcgcggtggtgagctaatcgcctatctcggacattaccaacgccagcgtctggtagccgacggattgctggcgaaaaagggctgcccgcagtctggtcaggtcgcgattattgctgatgtcgacgagcgtacccgtaaaacaggcgaagccttcgccgccgggctggcacctgactgtgcaataaccgtacatacccaggcagatacgtccagtcccgatccgttatttaatcctctaaaaactggcgtttgccaactggataacgcgaacgtgactgacgcgatcctcagcagggcaggagggtcaattgctgactttaccgggcatcggcaaacggcgtttcgcgaactggaacgggtgcttaattttccgcaatcaaacttgtgccttaaacgtgagaaacaggacgaaagctgttcattaacgcaggcattaccatcggaactcaaggtgagcgccgacaatgtctcattaaccggtgcggtaagcctcgcatcaatgctgacggagatatttctcctgcaacaagcacagggaatgccggagccggggtggggaaggatcaccgattcacaccagtggaacaccttgctaagtttgcataacgcgcaattttatttgctacaacgcacgccagaggttgcccgcagccgcgccaccccgttattagatttgatcaagacagcgttgacgccccatccaccgcaaaaacaggcgtatggtgtgacattacccacttcagtgctgtttatcgccggacacgatactaatctggcaaatctcggcggcgcactggagctcaactggacgcttcccggtcagccggataacacgccgccaggtggtgaactggtgtttgaacgctggcgtcggctaagcgataacagccagtggattcaggtttcgctggtcttccagactttacagcagatgcgtgataaaacgccgctgtcattaaatacgccgcccggagaggtgaaactgaccctggcaggatgtgaagagcgaaatgcgcagggcatgtgttcgttggcaggttttacgcaaatcgtgaatgaagcacgcataccggcgtgcagtttgtaatgcataaaaaagagcattcagttacctgaatgctctgaggctgatgacaaacgaagaactgtctaatgcgtagaccggaaaaggcgttcacgccgcatccggccactttcagttttactctttctcggagtaactataaccgtaatagttatagccgtaactgtaagcggtgctggcgcgtttaatcacaccattgaggatagcgcctttaatattgacgcctgcctgttccagacgctgcattgacaaactcacctctttggcggtgttcaagccaaaacgcgcaaccagcaggctggtgccaacagaacgccccacgaccgcggcatcactcaccgccagcatcggcggcgtatcgacaatcaccagatcgtaatggtcgttcgcccattccagtaattgacgcatccgatcgcgcatcagcagttcagacgggttaggtggcacctgaccgcgagtaatcacatcaaagcctcctttgccaaaatgctggatcactttgttgagctcatctttacctgccagatattccgacaagccatgttcattactcacggtaaacaggttatgcgaataaccacggcgtaagtcggcatcaataaataacactttttgatcggactgggcgatcaccgctgccagagttgaactgacaaacgttttaccactgtctggcgtcgcaccggtgatcattagaatgttattctccgtctccatcatagcgaaatgcagactggttcgtagcgcacgtacggcttccacagcagaatccgccgggttatccaccgccaggaaggggatatttttagtacgatggcgctgctgattagaaaataaatttttcttacgcagacgggtgcgtttatccagccactcggacattgggatagtggcataaacgctgatgccgtgctcttccagttgttccggggcttctacaccacgacgcaacatcgcacgcgccagcacggcacccacagaaataaacaggccaagaataaaaccaagcaccacgttcaacgcttttttcggtttcactggctgcggctgagtgactgccgggtcgataatccgcacgttaccaatggcactggatttcgaaatactcaactcctgctggcggttaagtaattgcagatataccgcacggcccgcttctacgtcacgacttaaacgcaacacttcctgttgggtggaaggcattgccgatacccgcttattcaggcgtttgcgttcttgctccagcgtctggcgtttttccagcagcgcacgataagttgggtgatctttcttatacagctgggagatctctgcctcgcggaaggtcagctcattgagttgattatcaacgttcacaatctgctcaagaacggctttggcttccaggttaaggtcaaccgaatcgcgctgctggcgataaacgttgagtttttcttccgcttggtccagctcgctgcgcacttcaggtaactggcgctgtaagaattcaaggctttgtgaatcctgcgccgcctggcgagcgatattctgttgcaaatagttgttagcgatgctgttcagaatacgagtaatcaactggggatcatcaccagtcatggtaagttccagcatcccgctttctttactgcgttcgctaacggtaaaggtttcctgcaatgcgttaatcgcttccagttcggtacgctggctcaggacaaactgtgttcctggtttggccttaatgtccgcgatagtcagcgcaacgccatctttttccagacgctggccgaccataccattgacggtgaactcttcaccttccagtgtatagtggccgttttccccaaccgtgagtgtcagttgctgatcctgaccattcagttgtggaatatgcatccagctgatcgccagctcacctggtttttctttggttaatctcgcccagccgcgacccacaatcggaaaatacttctgctcaactatgtcgcgcagattcagttcagcaatggttttaccgagaatcatgcgcgattgcagcagttggatctccggtgcagactcgggcgatgagttagggatcatatcgctcaggccgctgagaatggcgttgccctgtttttgctcaacctggaccagagtatctgcctgataaattggtgtgcttaacagcgagtaagcgacagcgatcagcgtgaataacgcggtcacgctgataataaacttacggtgatcccataactcgccgaccagacgaagcagatcgatctcattttcctgagtgctgcctggtggcgtattcatatttttagttgtcatcgtattttataaactcaaattaccggctgaggcgcttcgcccattcctgactggcgcgctccaacataccgtagacatgttcaaatgcgtcctgacttttacgatagggatccgggatctctttctgttccagccattgcccaaacagcattgtcttcccgcggacctcgggagcaattgcggtaacctgagcaatatgttccgactccattgccagaatcagatcgtaatttcgtgccatctcagcagtgagcttacgtccggcatgtccttcaagagatacgccatgattagcggcaacatctgccgctgtcgcatctgcagggtgttttaccagaccatgaacacctgccgatttgacttttacgcccggcagacgtttacgcagcaagcgctcgccaatgggcgaacggcaaatgttgccggtacaaaccaccaggattgagttaaattttagttgggccatgtttgaatccaccgtgaagtctctgtcaggtcatgcaccccggaaatcgtcggtaccagcagagaaatcacacggttccaacgagccagcggcgcggtagtgacataaacaatgtcgtaaggttcaagctggaattccgttccgagtatcattgccgatgcgtccttcgcattcagctgataaatattggcgattttgccattctgcttgttttgcgttgcacgaataacaaaaatccccgtcgcatcagcgacatcctgattcataccctcagcgttacccagcgcttccgccagggtcataccgctgcggtccattttcagcgtgctctgtttacccacttcacccatcacgaagactttcagatcatcgttgcgcggaataaataaaatatcgcccgggtgcagcagtttgttctggcgcaagtcgccacgctgcatcagcgcatagaggttcactttggtctttacgccattctgggtgagcaccacgttgcgccagtctgcatctgcggtcagaccgcccgcggcgttaatcgcatccatgatggtcagaggaatattggtaatcggctgctgacccgatttgctgacttcgccggtgacgtacgctttttgcgatcggaacgccgcgacgctgacatcgacttgcgggctttcaatgactgaatcgagacgcgctgtaatctcgttgcgtacctgggtaagtgttttcccggccactttcaggcgaccaatataggggtagaaaatcgcaccatcggcgttaacccagttgccggtatcactggcgctacggtattgccctgcgggggtggttagttccgggtgatcccagaccgtaaccatcaacacatcaccaatcccgatacgatattcatagtttgcgatttgctgctccagctccgggttagcctgcgacataatcggtttggcgcgcaactgatcaatcaatcctggcgtgacgggatagatattgaccattttgtccaggtcatactgattgtcaggtagttcaatgacatccttgttactggtcgataaattctgaccaggaacaagggtacatgctgtcaaagacagaacagccaatgtcagtaccgaaaacttaaaaatgttctttttcattggtttatatttatcagtcaatgtaatgttatgaattacgtcaggttattgtccaaccggtacttctcgctctgccgtcattggatagagctggtatttgcgtgacagcatttgtccaccatcacgcgtcaatggtgtccacgaaaccaccgcgcggttgcggttaggtccaatggtcatcaagtcgaatggaatcgagatataaaaacctttactaaagccgccttcgccgtagtcatctttagatacgttactgattgccgcccatacccctaccgccacgccgctgtcaaagcgtttggcgacgtcgatcgttgcgcctttatcttttgccagatattgcccaacgctaagtttcatcagtacgccattgagcgtcggcgggttccagtaagccgtcacgaaacctgttggcgtggaataatcggtgaaacgcatcatgttgtcccagtcacgttgcttcacgtagttaacgtccacacccagcgcccagcaggcatctagcgggcgataaagcagctcggaaccgacaccggcgtacatcgtttccagataaccgccatacacctggccatagaaaccattgcctaagtcagcaaaatagttcgcctgcaagttgttgagataaacgtcattgcgaacgtagtcacggatatgcgtgcgcacgcggggcagggtagagtccgcgggcaacagcgaagacttaaacttgtcgtagttgttgtaaatattggtgaaaataccgccatcaagcagcaggtggtcggtaaaccagtagcgggcactggacatcagccccagctggaacatatagaaatcttccgggccgcccagcgactgtgaaagtgttgggttgaaagagtagctaaagcgatcttcacgaatacggtagccccgaccaaaggcagaaagatcttcagcttcaacacgttgttgttgcagtggctctgattgaccaggcgctgtacctgccagctgtttgcgcaggctggctacgtcggtttcggtagtcaccatcgccatatgctcgcgcttttgcgtcacgctaatcttctcaacgccttgcggcaggttattcaccagaatccggttggcacgatcgaccgcttcacgagagtcacggtatttgtattgctgaccagacatatacagtgtcttatcgcgtagctgaatttctggcgcgtcaaagcccgcgttatacttcagggcggtaagttggtttgctaccgtggtgtactgcaatccttcagattcaggcgcaggttgatatgccggttttggcgtatcgcgcagggcagggcgcagatcgttgaaattggtccgtaacgtgaagccaaacatcaacgtgttaccgcgttcataactcaggttgagatctgcccagctggcagcgcgataaactgcgccgacgttgaaatggcttgcctgaggcagtttgccagcgaaatcattctggtaattgtttccatcgtattcgagtttcagacgcaggggattccacggcgtttgatactcaatgccgccaaagatggaagccgggccacgaaagatatcgctaaagctgatatcgcccgcatcgtgagactctgcgcgatgacaatatttatcgctcacccggcaaaacgggttggtaatattgcccgcattaccggcgtagccccatgccatcccgagggtgaaatcaaatggccccgcttgcttgctggccaccagatactcaccgtcaaacagacccgtaccagcaatatcacgtttaccaaacgccacttgcggtagccagtaaccttcttcccacaggcgaagtttaaaatcgaatgatttgtctttgtatgactgatcgccgctgaaatcttcccactggctatatttgcgtgtgcgcacatccgtataacgaatggtgccttccagccatgggaacagcgccacggaggtggagtagaaccggtattgatcgttatcccggtagttgacgctgaattcaccttccggtgcgatgcgcgcatttggcatctgcaacaatcctgtgccgccaaagtctgattgcgacgaacccagcggatccgggtaggttaatacttcagcatgacaggcactggagacggcaatggccaggcagcttaaaagataagaattcttcttcatcagtcaggaacacgttgcgttaaaacagacacaatctggtcatttaaatcagcatatttttcgggcagtacatgcgcagaaaagcccaaccaaagctggctgccaggcggtggttccacatgtcttttattccacagggcaacaggggcgacgacagtctcaccctcaggcgtaatcaccataacgttattcttgtccgcgcctgcaaggcgggggtgatcttgcagataatcggtaacgctacggcctgcctgccagggcaattgcccggccccagaaaccgcacccagcagagtaatagtcaccggacgctgtacggtatagagcgtatagtccccgaccaacgggggattgctgttctcatccactcgtacaaaatcagggtccagtttgaccggtaagcgaccagtgatattgagattgagtaactgctggcgcacggatttaatcgttgccgccacatcgtcgtcagcttctgcttcccaggaagcaagctgtgccatgacatgttggtagtctttaagcgctttagctttcgccgcagagtcggtcagcaaggcaccaggccaccagaggcgatcgcgcagttgcggttgtgtcaccaactggacaacattttccacggggccaacggaaagtgtctgttgttcgccaggcagataaatagtcaccgttccttgcgcaaaggcatggggtgtcattacgtaaagtacgctggcaatgaaatacgactgtaatttattcatggtgcgggtttaagaaacgtcatttctacgggaataacccctgcgcctaacatttgccgactttgacgaacctggccagtagccgaatcgacccagaatgtgttttgccactgtttttctggccgcgtggaagtcacctcttcctgccagacattacacagcacattgcgacccgcaatattcagcgtctctaatccagcaaaggaaaaagtagaactcagggtcgcagagcgaaaatggttgtcttcactccagagaatatcgcgcgtccagcggctgccatcttttattgccagcgcgttacgcagagggtcctgcccggaatttgtcacttccagcagattattattaagtttgacggtttttaaaagacgtccattgtgggtaaccagcatggcgttatcctgggataaccatttgctttgttcttgttctatatatcccagtaccacaaagattcgttgcccttcattaaggcgtaaatacatagtggaataaggcaacgcctggatctgctgatccgctacggtgatatcctgattatcgaaaaggctggcgcgaaatgtatcgaccatactttgctggctgtgcgtacatcccgcaagaaatagtgcgaaaatcgataaaataagagggcgcacctttaatccttgaaaggttaattaaaaaaatgcaaatctctaaagcccggtacgaatatcgcaaccgggtatcatttaactttaatttcgacgcgttaaagcagtattagcgtgtagtggacgtggtggttgaggtgttatgagaaccgccatcgccactgtcatttgctgcaacaactgccaacgtcgccacaccaacagccgttgccacaccgacaactgtcgccgtgccgacagcgccagcagccacgccaccagtggtagtagcagtcgtggttgcgccggtagtggtcgttgtggtgccagtagtacccgtcgttgcctcggtcccgtttgttgcttcaggggcagcaaacgcagctggcgtcgtcaacatgaaggccataaggattgcagaaagcttgtgtttcataacttttcctttattcatcgcatggacaatacgggtgatgctgccaacttactgatttagtgtatgatggtgtttttgaggttctccagtggcttctgtttctatcagctgtccctcctgttcagctactgacggggtggtgcgtaacggcaaaagcactgccggacatcagcgctatctctgctctcactgccgtaaaacatggcaactgcagttcacttacaccgcttctcaacccggtacgcaccagaaaatcattgatatggccatgaatggcgttggatgccgggcaacagcccgcattatgggcgttggcctcaacacgattttccgccatttaaaaaactcaggccgcagtcggtaacctcgcgcatacagccgggcagtgacgtcatcgtctgcgcggaaatggacgaacagtggggatacgtcggggctaaatcgcgccagcgctggctgttttacgcgtatgacaggctccggaagacggttgttgcgcacgtattcggtgaacgcactatggcgacgctggggcgtcttatgagcctgctgtcaccctttgacgtggtgatatggatgacggatggctggccgctgtatgaatcccgcctgaagggaaagctgcacgtaatcagcaagcgatatacgcagcgaattgagcggtataacctgaatctgaggcagcacctggcacggctgggacggaagtcgctgtcgttctcaaaatcggtggagctgcatgacaaagtcatcgggcattatctgaacataaaacactatcaataagttggagtcattaccgacaatacgtacgcttgagatcaggattgtctactttgagtataacatccttgtgaaatctccctttcctcataccgcttgcactatatactgcgggtaggaaaggcgcgcagagggaaatataagattgttaactatccccctctggaaatacgacttgtgagcataagataaatcttagcaaaatacaaattaaagataaggaaattgttacgaaagctattaattattgttggtaatatagtttcaagtggtactataactggctgttaaatggcatttataactattaggtgcagagatattcgcttaaatggattagtttctttgtggaaaagtaactgatgttataatgtatgatgttgactatttcactattccaataaaaccagtcagctttaaacaagcagcgtcatattaagagagataaacatttgccgctgttggtcctcgcaggccatttacgcggcaaaattccacacgtaatcctggtataagcacttctgcgtcgcggggagtgaatgcggaaatatggacctgaacttctttacgaccgtcggaggggataatgaatcctttgccgcttttgcgatcaaaggttttgacaattcctgtcattttacgggacaaacaaattccttactgaaaatactgcgctgcactatacggggttaataaaataaagccagcgatatttaagaccgccggacggctaaaataaaatttgcttaatctcaattatcatgcgttaatagctgcgtcggtttgaaagacagacagcatacaaagtagtttactaaagcagttctcattatcaggcattatccccttcttttgagtctctctcctgaacactaagtagtttctgtattaaagccctgtttgccgaaaggcccaaaatgaaggaagtaaaatatgtctaataaaatgactggtttagtaaaatggtttaacgcagataaaggttttggctttatcactcctgatgatggcagcaaagacgttttcgtccatttcaccgccatccagagcaatgaattccgcacgctgaacgaaaatcagaaagttgaattttctattgagcaggggcaacgtggccccgcggcagcgaacgttgttacgctctaaggttgccattattactcaacatctccatttccgctgtccatgttgtcatggttcacagtaccgcacatcggcattcgatgtgacggagcgaaaccctttgggcgctaagtgtattttttgtaaatcgacgatgatcacctttgataacgtcgcgctgcaaatacgcactgaccatgcgccgctggatttcacaaaataatatcaggctccctcgtggagccttttttatatctgccttatttttcttcaacgctgtatgtatagtaagcgataacctgttgattattgaatctttcggggagatggcttataacatttcttacctgaccagggtaccgggaaccaacaccttactggcgtgttgctgtcttttaagaccagaagaggttaacagtgaatattgaagagttaaaaaaacaagccgaaacggaaatcgccgactttatcgcgcaaaaaatcgccgagctgaacaagaatacagggaaagaagtctctgaaattcgcttcaccgcacgagaaaaaatgaccgggcttgaaagttatgatgtcaaaatcaaaataatgtgattttgtgaacatcaccccgtgcgaggtgatgttccgcttgttgctaatttagtgaccaatcattggcgcttgtggaattaagcgtcggtacaattcctccggcaccgggctttgccatactcccgcatacattgcgtaaccaatcaccgcaaacataatccccagaaccagtagcgtcattaaccagccagacaacgcaaaggcttttttatttgccgcaggtttttgcagtgaaaaggtcaatgttgaggctaccggacatgactctacgcaagtcatacagccggtacattccactgttcgtacctgaattaatttatcgaccgggatccgtgatgggcaattttttgcgcatttgccacagtcgatacaactttcggcattgcgacgaatcttaaacggcgacaatagcgaaaccacgcccatcagcgcgccatatgggcaaagataacgacaccaggcatggcgaataaacaggctggcaatcagcaaaacggtcacgctgattaatgtcgcggtccccatatgacgaaagaaatcgagcattttaacgtccatcaccacgctgtagggcgacaacataaaatagtgaatcgcctgagcgggcatcaataacgcgatatagataaaaaaactcaacagcaaatacttcacgccgcgcagaggaatatccagccagcggggaaggacacattgccgaccaaacagtttgttaccgagatcgccgattaattcagaaagcgtaccaaccgggcataaccatgagcaaaaggcctttttgagtaatagactgatgacgataaaagcgaccaataacagcatcgcggcggcgtggacggacggtaactgacctgttacaaggctatatttcagattcatcagcccggcaatcggtagccagccttcgatacctcccggtctggcgacaaatgtcgtgctacttgccgtttcgtaatagcgcacccaataccagaacgtgatggcaatataaatattcattgccaacagtaataattgcgtcgctttacgccaggtcgtggcattacgccagtcattccacggtaatttgccgcccgtcgtgcctggccgccgctgccagcgggttcttttattctctgccatgattttgccagtccgttaagttgtataccaaatgccactattctagttgttcttaactggctgatattgattcaaatcgcgttcaggtctttcttatgcaaccatgcttccagagcggcaacactgcgtgtaatttcttcgtgtggaaggggggcagataatggctgctgctccagttgtgcgcatagctggctggcgatatgcattcccagactcgagcaactgctttttagctgatgcgcggcacgctttattttctcgctatcctgactggcgcgggcaatgtcgatttcatcgagaagcggcagggcatgttgtgtaaataataccagccattcgtggatcttctccgtccccattaactgagcatcttcattgagttgcgatacatccagcgattgatcattattgacttgcagttggagatagtgcgccagtaactgaccgagcacttcacgcggcaccggtttagggataatcccgcggaataatgaactggtacgctggcgcagcgtttcgtcaatgacatgggcgctaaagccaatcaaaaccagcgacggatattgctgtgccagttgtcgggcaagcgtaatgccgtcgatatccggcagatcaaaatccaccagtgcggcagcaaacggttcgctattttgcagtgtctctaaagcctgcgcggcattgccaacagcaacaatctgcgcaccactggttttcagcatctcaatggtaattcgctgggttagcgggttatcttcaattaacagcaaacgtaaaccgtcaagacgcaccgcctgattgactgtttttggcacgggtgccgtggcaacacgtaacggcaagcgtaaacaaaaacagcttccaacctccggcgtgctggtggcgctcagttcgccgcccatcgcctgggccagacggctactgatagtcagtcccagcccggtgccgccgcgtttgccgcttacctgcacaaatggctggaagatttctgccagtttcgcgggatcaataccgcagccgctgtcttccacttcgaccagccattgctcgccatcagtgcgactacgcaggataatgtacccttcgtcagtaaaacgcagggcgttgctcaacaggttggttataacctgacgaatacgtcgtggatcgcccattaacgcgcacggcatatcatcggcaattgccgttgccaggcgaatcgggcgacctttcacccgtccgctcattaattgcagggtactttccagcagcgggcgcggttcaaagggctcatcgctgaccgaaacattcttgccacctgcttcgatagcggaataatcgagaatatcgttgaggatggtcagcaacgattcaccagagtcagtaattgcccgcaaatcatcacgctgggcgttaagtgcggggttatctgccagcagttgagcagtgccgagaataccgtacagcggtgtgcggatctcatggctcatcgccgccagaaacgccgattttgcctggctggctttttctgcttccgcccgtgcctgtcggtgttctatcaccagttcctgcaattcagctgtacgcgctttgacctgcgccgccagctgttcgcggtggcgattcagtgcatgaacattgctgcgaaacgcatccatcagccgcccgatggtatccagctcccgtacgccagcggtttccgggaaaggggagtcaatatcaccgtccagcagccgttgcagcgcctgcgtttgttcggcaagtggacgcgtgactgagcgataaaccacgcgccagaggatcagaatcagtgcgcaaagtgaaaccatccccagcaataacaggctgtattgcccgcgtgcactcgctttttccagatgcgccagtccgtgctgattacgcagctcaatggtgtcgaccagctgactgacttcgctactaaactgcgcgaactgggcgatgttattttgtgcgagagtttgtaggtgattgctgatttcactgtcctgctgatacagcgccagcaaatcgctatattggctaacggtagttaacgttgttgcgacctgcgcacgaacacccggatcttcaatgcgtatttgccgacgttgcagaattttcaccgcattattgagctgcttttccagcgttggtgcatttttctggatctgctccagccccagattcatcaccatttgctgcacccgcagagcgctaaggcgcagttcattcatctggttaacatactcaagatcgatatcaatcagccgatcgagtgcactttcagcagcctgacgctgatcttgttcgatcaaatcgtaaatcccggcctgggtcgctccagcggaagttgtcgcattattcgcctgaccttgcgccaggcgtgcgatctcatcggcggcagcgactatctgctgactgagttgctgttgttgctggcgcagttgcaaacgctgccccaccagttccccttgctgacgtaacgaacgggagatctcctgctcctgttgttcaatagcggtggtatcaaaaccttgttcccgtaacgcttgcagcaacgcattaatcttcaggctttgtgcggtgagcattcgcccctgcgcctgccacatcttttcgttatcggcactggtcaggttctgcgcggcgaaaagttcccaggcgctggcttcgctcaactggcgcgccatattcatggtaggaatcaatgcctgagtgttgtctttttccacctggctgataaagcgcaggttgtaccatcccaccagggtactggtcagggttaacagcgccatcagggcaaagcccatccagagtcttcgggtcagggttaaattcacggtcggtgcactttaggtgaaaaaggttgagtcgcaaagcggaatgcatctagcataaagccttattattgatgaggctatcatgcgcgtactgctatttttacttctttcccttttcatgttgccggcattttcggctgataacctgttgcgctggcatgatgcgcagcatttcacggtgcaagcctctacgccgcttaaagccaaacgcgcatggaaactgtgcgcgctttatcccagcctgaaagattcatattggttatcgttgaactatggtatgcaggaggctgctcgccgctacggtgtggatttaaaagtgctggaggcaggcggctacagccagttggctacccagcaagcacaaatcgaccagtgtaaacagtggggcgcagaggccattttgctcggtagtagcacgacctcatttcccgacctgcaaaagcaggtagcaagtctgccggtgatcgaactggtaaatgctattgatgctccccaggtgaaaagccgcgttggtgtgccctggtttcagatgggctatcaaccggggcgatatctggtgcaatgggcgcacggtaaaccactgaatgtgctgttgatgcccggacccgataacgccgggggcagtaaggagatggtcgagggttttcgcgcagccattgccggaagcccggtgcgtattgttgatattgcgcttggtgataacgatattgaaatccagcgtaacctgttgcaggagatgctggaacgccatccagaaatcgacgtcgttgccggaacggccattgcggcagaggcggcaatgggggaagggcgtaacctgaaaacgccgcttaccgtggtgtcgttttatctttcacatcaggtgtatcgcgggctgaagcggggaagagtgattatggctgccagcgatcaaatggtctggcagggggaactggcggttgagcaggccatcaggcaattacaggggcaatcggtttctgataatgtcagcccaccgattttagttctgacgccgaaaaatgccgaccgtgaacatattcgccgctcgctgtcaccagggggatttcgtccggtctatttttatcagcacacatcagcggctaagaaataaccttcaccatgttgcgtcaccagtaaatccgcgctgagtttatgacgtaaacgacgaattaacacatcgacggtgcgcaggtcagggttttccacccgacgcgcagaaagcatacgtagcagacgttcacggctgagaatttcgcccggattcgtcacaaatgccaccaacatttcatactctgcgcgggtcagtttaatcggctcgccatcccgctccagcgtatggcgcgacacattcaggcaataaccggcaaagcgatagcagttgtcctgagtgtgcggttgagcttgtcgcgcgaggtcgattcgccagagcagatttttcacccgtactaccagttcgcgcagttccagcggtttggtgacgtaatcgtctgcgcccatttccagcccaacaatacggtcaatccgatcgctgcgtccggtaaccagaataatccccaccgttgagcgttctcgcagggcgcgggttaacatcaggccattttcatcgggtaagttgatatccagcagaattaaatctaccgactgattctgcataatttcccgtagcccagcaccgctcgccgtaacggaaacggtatacccctcctgagtgaagtaggattgtaatcgcgcctgggtaaccggctcatcttcaacaataacaatgtgatgtggcatcagagggttttactcattctgttcatatctgttcatattctgccgtaagccgttcatcctgaccagtgccgctgttcatatttgctcattaagatcgcttcactaaaccataattctacaggggttattatgcggaaactctggaacgcgctacgccgacccagtgctcgttggtcggtactggcgctggtcgcaattgggattgtgattggcattgcgctgattgtattgccacacgttgggatcaaagtcaccagcacaaccgaattttgtgtcagttgccacagtatgcaaccggtgtatgaagaatataaacagtcggtgcatttccagaacgcctccggcgtgcgagctgaatgccatgactgtcatatcccgccggatattccaggcatggtgaagcgcaaactggaagcgagcaatgatatctaccagacctttattgctcactccattgatacacctgaaaaattcgaagccaaacgcgcggaacttgccgagcgtgaatgggcgcgaatgaaagaaaacaactcggcaacctgccgctcctgccataactacgatgcgatggatcatgcgaagcagcatcctgaagcagcacgtcagatgaaggtggcagcgaaagataatcaatcctgcatcgactgtcataaaggtattgcccaccagttaccggatatgagtagcggcttccgtaagcagttcgatgagctgcgcgccagtgctaatgacagtggtgacacgctgtactctattgatattaagccaatttatgcggcgaaaggcgataaagaagcctctggttctctgctgcctgcttcggaagtgaaagtccttaaacgtgacggcgactggctgcaaattgaaattaccggctggacggaaagcgccggacgtcagcgtgtactcacccaattcccaggtaaacgcatctttgttgcctcgattcgtggtgatgtgcagcagcaggtaaaaacgctggagaaaaccaccgttgccgacaccaataccgagtggagcaagttgcaggccactgcgtggatgaagaaaggcgacatggtgaacgatatcaaaccgatctgggcttatgcggattcgttgtacaacggcacctgtaaccagtgccacggcgcaccggaaatcgcccactttgacgctaacggttggatcggcacgctcaacggcatgattggctttaccagtctcgataaacgtgaagaacgcaccttgttgaaatatctgcaaatgaatgcgtctgacaccgcaggtaaggctcacggcgataagaaggaagaaaaataatgaacaataacgatctctttcaggcatcacgtcggcgttttctggcacaactcggcggcttaaccgtcgccgggatgctggggccgtcattgttaacgccgcgacgtgcgactgcggcgcaagcggcgactgacgctgtcatctcgaaagagggcattcttaccgggtcgcactggggggctatccgcgcgacggtgaaggatggtcgctttgtggcggcaaaaccgttcgaactggataaatatccgtcgaaaatgattgccggattgccggatcacgtacacaacgcggcgcgtattcgttatccgatggtacgcgtggactggctgcgtaagcgccatctcagcgatacctcccagcgcggtgataaccgttttgtgcgcgtgagctgggatgaagccctcgacatgttctatgaagaactggaacgcgtgcagaaaactcacgggccgagtgccttgctgaccgccagtggttggcaatcgacggggatgttccataacgcttcggggatgctggcgaaagctattgccttgcatggtaatagcgttggtacgggcggagattactctaccggtgctgcgcaggtgatcctgccgcgcgtagtcggttcgatggaagtgtatgaacagcaaacctcctggccgctggtattgcagaacagcaaaaccattgtgctgtggggctccgatttgctgaaaaaccagcaagcgaactggtggtgcccggatcacgatgtttatgaatattacgcgcagctaaaagcgaaagtcgccgccggtgaaattgaggtcatcagcatcgatccggttgtcacatccacccatgagtatctggggcgcgagcatgtgaagcacattgcggttaacccgcaaactgacgtgccgctgcaactggcgctggcacatacgctgtacagtgaaaacctgtacgacaaaaacttccttgctaactactgtgtgggttttgagcagttcctgccgtatctgctgggtgagaaagacggtcagccgaaagatgccgcatgggctgaaaaactgaccggcattgatgccgaaaccattcgtgggctggcgcggcagatggcggcgaacagaacgcaaattattgctggctggtgcgtgcagcgtatgcagcacggtgaacagtgggcgtggatgattgtggttctggcggcgatgctggggcaaattggcctgccaggtggtggttttggttttggctggcactacaacggcgcaggcacgccggggcgtaaaggcgttattctgagtggtttctccggctctacgtcgattccgcctgttcacgacaacagtgactacaaaggctacagcagcactattccgattgcccgttttatcgatgcgatcctcgaaccggggaaagtgatcaactggaacggtaaatcggtaaaactgccgccgctgaaaatgtgtatttttgccggaactaacccattccatcgccatcagcagatcaaccgcattattgaaggcttgcgcaagctggaaacggttatcgccatagataaccagtggacctcaacctgccgctttgccgatatcgtactgcctgcgaccacgcagtttgagcgtaacgatctcgaccagtacggcaatcactccaaccgtggcattatcgccatgaaacaggtggtgccgccgcagttcgaggcgcgcaacgacttcgatattttccgcgagctgtgccgtcgctttaatcgcgaagaagcctttaccgaagggctggacgaaatgggctggctgaaacgcatctggcaggaaggtgtacagcaaggcaaaggacgcggcgttcatctgccagcgtttgatgacttctggaataacaaagagtacgtcgagtttgaccatccgcagatgtttgttcgccaccaggcattccgcgaagatccggatctcgaaccgctgggcacgccgagtggcctgattgagatctactcgaaaactatcgccgatatgaactacgacgattgtcaggggcatccgatgtggtttgagaaaatcgaacgctcccacggtgggcctggctcgcaaaagtatccgttgcatctgcaatctgtgcatccggatttccgacttcactcgcagttatgtgagtcggaaacgctgcgtcagcaatatacggtagcgggtaaagagccagtattcattaacccgcaggatgccagcgcgcgcggtattcgtaacggtgatgtggtacgcgtctttaacgctcgcggtcaggtgttggcaggggcagtggtttctgaccgctatgcacccggcgtggcacgaattcacgaaggggcatggtacgatccagataaaggcggcgagcctggtgcgctgtgcaaatacggtaaccccaacgtgttgaccatcgacatcggtacatcgcagctggcgcaggcgaccagtgcgcacactacgctggtggaaattgagaagtacaacggaacagtggagcaggtgacggcgtttaacggccccgtggagatggtggcgcagtgcgaatatgttcccgcgtcgcaggtgaaatcatgaccacgctgacagcacaacagattgcctgtgtttacgcctggctagcgcagttgttctcccgtgagctggacgatgaacaactgacgcaaatcgccagtgcgcagatggctgaatggttttcgttgctgaaaagcgaaccgccgctcactgcggcggtgaacgagctggaaaaccgtattgccacgctgacagtacgtgacgatgcccgtctggaactggccgcggacttttgcggcctgtttctgatgaccgacaaacaagcggcgctgccgtatgcatcggcctacaaacaggacgagcaagagattaaacgcttgttagttgaggcagggatggaaaccagcggcaatttcaacgaaccggcagatcatctggcgatctatctcgaattgctcagccatctgcatttttcgctgggagaggggaccgttcctgcgcgaagaatcgacagtttgcggcaaaaaacactgacggcgctgtggcaatggttaccagagtttgttgcgcgttgtcgtcagtatgacagctttggtttttacgcggcactaagccagttattgctggtgttagtggagtgcgaccaccaaaacagataacgtcgtttgtgcgcctgaaaagacgcgtttagcgtcgcatcaggcattatggcgcagttgccggatgcggcgtgaacgtcttatccggcccacaggaactgtaatctttgtagaccggttaagatgcgtcatcgcatccggcaaacacacatcacggatgagctacaaaccgggaaagccgctggcgcagcaggcggttttcctgcttcaggtgcgcaatatcatccattaacgtcagcgccaccgcgatccccggccagtccagagccagttcatgacgcaggcgtaccgcgcgttgcaccacaatggcggcatggtcgtcaaatacccaggttgtttcctggatctcacgcggttcaaccacccccaaaccgacaatttcattcaactcctcttcagagatgccggtatgcaggcaaaattcggtaatagtaaaagtcaccgtaacattagccattatgctttcccccaatctttacgtggatcaaaagacgactgggcgtctgccagttgctgccacagcgcggcagtgttttcatccggtttcggcggcatcacgattttcagtaccgcatacagatcgccggtctgttttttgctcaccagacctttgcctttaacgcgcaatcgttgcccggcctggctgcctggcgggatagtcagcaaaatgctttctttcagtgttggaacggtgactttagcacccagcgccgcttcccacgggctaaccggcaccacaatttccagatcctggccgacaatatcaaacagcggatgtggcgcaatatgaatcaccagccacaaatcgccatttggaccgccgttttcgcccggcgtcccctggcctttcagacggatgcgttgaccattgccgacgcccgccgggatcttcacattcagcgttttcggaatttcctgttcgatcatgccaaaggcgttataaaccggcaggttatagctgatggtacgcttatgctcagtaagcgtttcttcgaggaataccgccacttcgatttcaatatcgtggccgcgtgtggcggggcgttgacggctctggcgggcatgctgaccgaaaattgacgagaagatatcgtcaaaatcttcggcgttaaaactctgaccgtcgccatggtggaactgacggttaaattgcggatcgttgcgatgttgccacatctgatcatactcagcgcgacgttgttcatcacttaacacttcccaggcttcagcgacctctttgaagcgggcttcggcatccggttctttgctgacatcaggatggtatttgcgggcaagtcgacgataggcggtcttgattgtcttgagatcgtccgtcggtttcacgcccatgatggcgtaataatcctttaattccatagcgttatctcgcgtaaatcaacacaaattgaaggaacccctgtaaggtaactcctataagtgtagggtaatcctcaaaatttcatatgccaacacagaatatgttattgaaatcatcgcggagaggaggtcgccatcaagatgggttgctgaacatattttaaacaggtgaaaaagggtgagcgatttttgatagttgaaccaggcactttaagtttaactagggcgtcattatttattaaattttatagacgctatatatgggtagtaatatacatggaattagttgcactgcaaataattatttgaaacaggcctggaacgatataaaaaatgagtacgaaaaaaatcaaacatattcaatcacgctttttgaaaacacactggtgtgttttatgcggttatacaatgaactcagacgtaaagtaaatgaagaggatactccatgtctggaatgtgaatcactagaaaaagaatttgaggaaatgcagaatgataatgatctatcattatttatgagaatattgcgtactaatgatacacaaatttattcaggggtttcaggaggtattacatatactatacaatatgttcgagatattgatattgttagagtgtccttgccgggcagagcttcagagtctatcacagattttaaaggttattattggtataactttatggagtatattgaaaacattaatgcgtgtgatgatgttttttctgagtattgttttgatgatgaaaatataagtgtccagccagagcggataaatacgccgggaatatctgatttggattctgacattgatttgtctggtatatcttttattcagcgtgaaactaaccaggcattaggattaaaatatgctcctgtagatggcgatggatattgtctgttaagagctatactggttttaaaacaacatgattattcatgggcgctggtcagttataagatgcaaaaggaagtttacaacgaattcattaaaatggttgataaaaaaacgatcgaggctcttgttgatacggcattctataatctcagggaagatgtaaagacgttatttggcgttgatctacaatctgacaaccaaattcaggggcagagtagtcttatgtcatggagctttctgttttttaaaaaacaattcattgatagttgcttgaataacgaaaaatgtatcctgcatttacccgagtttatatttaatgataacaagaacttgcttgctttagataccgacacgtcggataggattaaagcggtgaagaattttcttgttgttctttcagatagcatttgctcattatttattgttaatagtaatgtggcatcaatctccttggggaatgaatccttttcaacagatgaagatcttgagtatggttatttaatgaacactggcaatcattatgacgtttacctccctcctgaactttttgctcaggcttacaagttaaacaataaggaaatgaatgcgcaactcgactatttaaatcgttatgcaatttaatggcaaaggcatatgctaaaaaccattgttattagtctcacacttttttattggtaaatattgtctctgtattggtaacgccgcagatattctgtttagccacaggtgcaattatcagcggcgtacgcgaggcaggggctaatcaggcatagtttgcgtcaaaccttgcctgtttttgaagatgtatatagaaaaacaggcgttcaacaagccattttgcgaacctgttcccggaaaaaagtcatatttctgtcacactctttagtgattgataacaaaagaggtgccaggaatgaacaaaacgctaatcgccgcagctgtggcagggatagttttactcgcttcaaacgctcaggcacaaaccgtaccggaaggctatcagctacagcaagtgctcatgatgagccgccataacttacgtgcgccgctggcgaacaatggcagtgtgctggagcagtcgacgccgaataaatggccagaatgggacgtccccggtgggcaactcaccaccaaaggtggcgtgctcgaagtgtatatgggccattacatgcgtgaatggctggcagagcaggggatggtgaaatcgggggaatgcccgccgccgtacaccgtttatgcctatgccaatagtctgcaacgtaccgttgcgaccgcacagttctttattaccggcgcattcccggggtgtgatattcctgtgcatcaccaggaaaaaatgggcactatggacccaacctttaacccggtgatcaccgatgattccgccgcattcagtgaacaggcggtggcggcaatggagaaagagctcagcaaactccagcttaccgacagctaccagctactggaaaaaatcgttaactataaagattcccctgcctgtaaagagaaacaacagtgttcgctggtggatggcaaaaatacctttagcgccaagtatcaacaagaaccaggtgtttccgggccgctgaaagtcggcaactcgctggtagatgcgtttactttgcaatattacgaaggttttccgatggatcaggtggcctggggagaaatcaaatctgaccagcagtggaaggtgttgtcgaagcttaaaaacggctaccaggacagcctgtttacctcaccggaagtggcgcgcaatgttgcgaaaccgctggtcagttatatcgacaaagctctggtcaccgatcgcaccagcgcaccgaaaattacagtgttggttgggcacgactccaacattgcctctctgttaacggcgctggatttcaaaccgtatcagttgcatgaccagaacgaacgcacgccgattggcggcaaaatcgttttccagcgttggcatgacagcaaagccaatcgcgatttgatgaaaattgaatatgtgtatcagagtgcggaacagttacgtaatgccgatgcgttaaccctgcaggcacctgcgcagcgtgtgacgctggaattaagcggttgcccgatagacgctgatggtttctgcccgatggataagtttgatagcgtgttgaatgaagcggtgaaataacagaaaactcccccgcgagaagcgggggagtcgctggttaaacgtttttacgttcgatggtctgttcgccccaaaaaagcgaatctttatcggtcttagcaaaggctttgactaacacttcatcactaccttcttcccaaatcttttccgccattttttcgtcgtacccggcgacttcgaaaatggcctcggctatttccggcgacgtattgcgcagagatgcccattcaccgacgtgatgagctttcgcttcttgagttggcatgcgtatcctcctgttgaagattagccgttaagtttaactgccagacctgcgacatattccccttgataacgagcaatagacagttcttcctggctgggctggcgtgaaccgtcaccgcctgcgatggtggttgcgccgtacggcgtaccgccgcgaacctgtgaaacgtcaaataattcctgcgctgcgtagccaatagggacaattaccatgccgtgatgcgcaagggtcgtccaggtggatgtgatggtttgttcctgaccgccgccagtaccggtggaactaaagacgctcgccagttttccgtatagtgcgccggaagcccacaggccgcccgtctggtcgaggaaggtacgcatttgaccggacatgttgccaaagcgggtaggtgtaccaaaaataatggcgtcgtaatcggccagttcttgcggggttgcaaccggtgcagtttgcgttttaccgcctgctttttcaaataattgcggcggcatggtttccggtacacgcttaacgacaacttcagcgccatccactttgcttgcaccctcagcgactgcgcgtgccatcgtttcaatatgtccgtacatggaataataaagcaccagaactttagccatttctaaccactcctcgtgttatctctattccgtagcgattcgctaccacttatttaaagataagacgtccttttcagagtgcaaatttcacaaccacttatttgatttataacaactttcacaagcacgtaattttgtcgcaaaatgacacatttttatctcatcgcgtttttttaatcataagagcggcttatggataattattggagatgatatctattctcgctaagaagctgttgcaggatattaccaaacgcgggtctgcccgcgtcagttcactaagcttagtcccacgtagcgaaaatatggcagccgccatacgccgcgttaattctatgcaatatgatgtctatacccagacggaggtcagtaatggcaaaccatcgaggcggttccggcaattttgcagaagaccgcgaaagagcatcagaagcaggtaaaaaaggtggacagcacagcgggggtaatttcaagaatgacccgcagcgcgcatctgaagcaggtaaaaaaggtggtaagagcagtcacggcaaaagcgacaactagccgggctaatcaatgacgaatgcatttttgtctgtagctcgtcaaaaagccatcaccgccggttacccggtggttgatactgatgacaaatgtaagcttgcctgatgcgcgatgcttatcaggcctaccagaagattgcaatatattgaatttgcactgttttgtaggccggataaggcgtttacgccgcatccggcatgaacaatgcgtacgttgtcaacaatctgcaccgccggtaaccccggcggttttctgtttatggctcctgatgaacaacttctggcggtggaacgtcaaccaactttctgcttaacaacgcattgagtaaaatcgcgccaaaggttgctgtaccaatccctcccaacgtaaaaccgcccagcgtgagagcaaaatcacccgcgcccagcactaaggttactgcgaccataatcaaattaccgttctggcttaaatcgacacggttttgtacccatatccttgcgcctgcgacggcaatcagcccgaacacaacaattgatgcaccaccaataaccgcggccggaatggtatgaatcagcgcaccaaatttcggtgaaaagcccaacagcatggcgatgacggcagcagcaacaaacaccagcgtcgagtagactttggtcacggccatcacaccgatattttcagcataggtggtcacgccgctaccgccgacagagccggaaagcatcgttgccagaccatcgcctacgaatgcccgccccatatacgggtccatattgcgtccggtcatcccggcgactgccttgagatgacctaagttttccgccaccagaatcaccgccacgggcgcaatcagcatcattgcctgaccattaaaagcaggagtggaaaaatgtggcagaccgaaccaggcagcatggctgacgagagtaaaatcgacggcttttcccagccctaaaacgttggtcatcacgccatacagcagacaggcgacaattaatcctacgagaatcaataaccgctggatcatgccacgggtaaacaccgccaccagcccaatacacagcaccgtcattaccgccatccagctatcaaaggccgaagccgatacacttttcactgcgataggcgctaagttcaggccaatcgccatcaccaccgcacccgtcaccaccggcggcatcagtcgttcaatccagcgcgtaccgattttcatcaccaccaggccaatgacggtataaaccagcccacaggcgataatcccgcccagcgcaatgctgatattcgggttaatgccctgaccgttaaagcccgtcgcggcgatcaccacgccgacaaaagccgcgctggagccgagataactggggacgcgcccgccggtaataaagaaaaacagtaacgtgccgatccccgacattaaaatggaaagattgggatccagccccatcagaatcggcattaacaccgtcgcgccaaacatcgccaccgcgtgttgaacgcccattactgccgtctgagcaaacggcaatcgttcatccggcgcgaccacgccgctctctgtagaggtcgattttaactgccagtgaggaaaaccgaacattgccatcagctgtctccttaaggaggttaacaagcagggcgcatcagcgcgtgataactgcgatcgaaccacaccagcccgtagggtgtggtgtgacgatgaatcgcttcgatggcgcaaaacagaatgtcgtgggtgccgacgctcaccacctggctgatacggcagtcaaacgaaaccagagcctcttccagttgcgggcatccggtcacccccgtctgccagcgggcggcggcaaagcggtgttccatgggcgttttgccgccaaaaaggtttgaaagcggctcctgcccggcgctaagtgtatttacacacagcgttcgattttcattgaatgccggccagacggacgccccacgattcaggcacaccagtaatgtgggcggcgtatcggtcacactgcagacggcgctggcggtgaacccggcgcgcccggctggaccgtccgtggtgataatattgaccgccgcgcccatgcaggacatcgcatcgcgaaaagtttgttgatcgacaatgttcatagtttgctccttacaacagcccgcaggcttcttcaaaggacagacgtggcaggcgcgcataaagcttgctgctatcgccatagccgatattaatcagcagattgctcttcagcgtgctgcccgtaaaaaaggcgtcgtccacgtgttgacggtcaaagcccgacatcgggccggtatccagtcccagcgcccggcaggcgacgatcagataggccgcctgcatggaactgttgcgaaacgctgtttcttcggcaagttgtgggctggaggtaaaccaactgcgggcatcaccgtggggaaacagtagtggtaaccgttcataaaattcactgtcccaggcgacgatagcggtgacgggcgcggtcagggttttttgcagattgccgctggaaagtgccgggcgcagacgttcttttccttctgccgtgcgggtaaacacgatccgtgccggagaacagttagctgatgtcggcccccatttcatcagggcataaatctcccgtaacgtctcatcgctgacgggtgtctcccgccagccgttgtgagtgcgggcatcggtgaacagggtgctaagcgcacctgggctaacggcttcgttcatagcaattccttacagggcggcttcacggtgatgtaacaggctggcaagcccgttgagtaacagagcattaaacgtttcgggatcggtcacgttgcaggcgtgtccgccatagggcatcaccattttctggctatcgggcagggcggcatgaagttcactggaacatgctgttggcaccagcagatcatcactggcgcagatgatttgcaccgggcagcggatgcgatccgcatggtgactaaagtcagcgcgtttgagggcgttaagtcgacgcagtaaattatttttgccctgaaaatgcgccagtgccagcgcgtcttctgcctccaggcgaggtgcgcgggccgccatccagtcggcgggatagaggaacaacggctgcgcttccacccatgcctgcgcgccgccgctatacagtaatcgttcgcgaacctgaaaacagcggcgcgtatgggcgtttattcgtagccagccgttaacgctgatcagcacagttaccgacgcgggataatccagcgccagctgcattcccaccagcgcaccgagcgcatggccgaccactgcgtaatgctcaatccctgcggctaccagcgcctgatgcagttccgctgccatctgggcgatactgtaatcttctgccagcgtgtcgggattattgccggtgccgcgctggtcgtaacagactacctgatactcctgctccagcaccgccagttgcggtaaccagtaactgccgctacccccaagacccgaaatcaacaccactacgggcgcatcagcataagggggaggtgagagtgaaagtttcatcgcggcctcacttggcgatatgcgcaattgtggcgatttccaccagcgcgtcaggttttaccagtccgcactgaatgcagaatcgcgccggtttatcacccggaaaaaactcggcgtagatttcgttaatcgcggcgtaatttttccagtcggtaataaagatgctgttgaaggtcacatccgccatcgtgccacccgccgtctcgatcaccttgcggatagtttccagaacgtggcgggtttgcgcctttgggtcatcggcaaacagcacgttattatgttgatcaaaagccagcgtaccggagacatacaccacgccatcagccagcgtgccgggaacgaagggggccagcggtgcgctgctgccagcgggaataattacggattttggcatcgttaaactccttaagcgatatgagcaaaggacgtgggagaaagcgcgtcgcagaatgtttcgacgtcgctgacccagccaaaaaaggtttcgatattgaacaacgcggctttctgcgcaaatttcggccccgcctggtgagttgcgtcttcaagcaccacgccgaaatactccagaaaaaagccgtcgcgtagcgtcgattcgacgcagacgttggtagcgatgccggtgaaaaccagatggcgtattccgcggctgcgcaaaatgctgtccagcggcgtattgaagaaaccgctgtagcgcggcttcggcagcacaatatcgccaggctgcggcaccagttcatccaccagttgataatcccaggagcctttcgccagcaatttcccctgcagctgcggctgcttacgcatggttttcagggcgttcgatttatgaaaattcggtgagccgggtccgccagcctcgacatactgttcatcccagccattttgaaaccagatgatcagcatccctgccgctcgcgctgcggtcacggcggtttgaatgttggcaatgaccgggcgagtggttgagacatcaaacccggcgagatctaagtagccgcctggcgtggcataagcgttttgcatatccaccacgatcagcgcactttgctgcggatcgaaggtaatggcttccggtcgagcggttaaggtcgtcatcatgccacctcctgagtcagcgcaggtagatgggcgcggcattgcatcagtggttgaatgcgctcgccgaaggtttcgattcccgacagaaaatcgtcgaaggttaacagcacgccttcggcaccaggcacgcttgcgacttcatctaacatgcgcgcgacactggcgtaagaaccgactaacgtccccatattgatgtttaccgccgaagtgggatcggccatctgacgaacgttggtgtcagtaccggagcgggtatctttctgactttgttcggttagccagcttaacgcctcttcatccgcgcccgctttgtagtgttcccatttggcgcgagcggcatcgtcggtttcatcggcaatcaccataaacaacacataagagccaacgtcgcgtccggtttgctctgcggcctgtttcatccgcgcagcggtcggggcgaaagccgtgggtgtatttacgcctttgccgaaacagaagttgaaatcggcataccgggcggagaacgccatgccagcgtcgctttgcccggcgcagatcactttcatggggacactcggttgcggactcacgcgacaatcattcatggtgaaaaaatcgcctttaaaatcgcttttccccgtgccccacaggtcgcgcagcacctgaacatattcggtgagatagtcgtaacgacgggagaaatagtcatcgccaggccagatacccatctgctcatactcgggcttttgccagccagtcacgaggttgacgccaaaacgcccgccagagatggagtcgatggttgcggccatacgggcgacgattgccggaggtaacgttaaggtggcagcagtggcgtaaatctgaatgcgcgaggtcacggccgccagccccgccatcaaggtgaacgactcaaggttgtgatcccagaactcagttttgccgccaaagccacgcagtttgatcatcgacagggcgaaatcgaaatggtagtgctccgctttttgcacaatggctttattcagttcaaaggtcggcatgtactgcggcgcgtgggtcgaaatgagccagccgttgttgccaataggtacgaatacgccaattttcatcatcaacctctcttcgtctcgtaaagtgaaagtcagacggggcgctgcatcctgcatatccttttcagccgcgtattggcttgtttgcaaagcggatgccagtttttaaaaagttaatgttattaatctgttaacattacgttatctaaaatatctggtaaaaagtggactaaacggtcaaaacagttgcacataaaacatgcatctgtgcgcgatgagagtgcagaaggtcgaggccgggcgggggttttgctatcctgttgccaatctacaagaggggagagcgcatgacgcaaggcgcagtgaaaacaacgggtaaacgttcgcgcgcagtaagcgcgaagaaaaaagcgattcttagcgcagcactggacactttttcacaattcggttttcacggcacaaggctggagcagatcgcagagttggcgggtgtttcaaaaaccaatctgctgtattactttccgtcaaaagaggcgctgtatattgccgtgctgcggcagattctcgatatctggctggcaccgttaaaagcgtttcgtgaagatttcgccccgctggcggcgatcaaagagtacatccgtctgaagctggaagtctcacgcgattatccgcaggcttcgcgcctgttctgtatggagatgctggcaggcgcgccgctgttaatggatgaactgacgggcgatttgaaggcattaattgatgagaaatcggcgctgattgccggttgggtcaaaagcggcaaactcgcgccgattgatccgcagcatttgatttttatgatttgggcttccactcaacattacgccgatttcgcccctcaggtggaggcggtgacaggcgcgacgttgcgcgatgaggtatttttcaatcaaacggttgaaaacgtgcagcggattattattgaggggattcgaccacgttaaagatgccggaggaggttgtaacatcctccggctacctgtttaacctatagtcattaagctggcgttaccgccagcggcagcggtattcacactcagcgaacgctcgatatacagccgttccagaaggatattgctttcgccacgggcaaaaccctgcaccgaaacaattgtgccatcccgcgcggcaactgcttcacacaatgcgcgaagctgatccgaatcaccgtggaagatcaccgcatcaaacggttgagcggttatattttccgctttcgccagttgaatacgttcgctgactgccgatggcaatgccttcactaactgacgatgcagcgcgtcatccggccacagtacctggctgcccaccgccagcacggcggcgagctgagtcagcgcatcctgctcatcatcggcaatacacaacacgcgctcacgcggcagcagcgtccaggtgttgcgttcacccgtcggccccggcagcaatcgttgtgttcctgcctgcgccagctcgccatattgcgtacataacgcctgcaattctggacgatttgctgcccattcccgcagtgcatttagcggctgagtcaatgcggctttcaactgcgcatcgaccggatactttgcatcctgacgcgcgagcgtcactgccagcgcactttccgggcgattcgccagcagacggtagagatagagcggaccgcctgctttcggcccggtaccggacaacccttcgccgccgaacggctgcacaccaaccactgcgcccaccatattacggttaacatacaggttaccaacatgggccgagccagtgacctgggcgatggtttcatcaatgcgcgtatggacgccaagcgtcagaccataaccggaagcgttaatctgctcgatcagctctggtagctggttacggttgtaacgcaccacatgcagcaccggaccaaagacctctttttgcaattcggcaaagtcatccagttcgatcagcgtcggggcgacaaaggtgccgctttgccattcacgggcatcttcgctgttttcccgcaccgcctggaacaccggacggcctttgctacgcatggtctgaatatggcgctcaatattggctttcgcttcgctatcaatcactggaccgatatcggtggtcaggcgacccggattacccatccggcattcggccattgcgccgcgcagcattttcaacgtgtggtcggcaatctcatcttgcaggcacagcacgcgcagcgccgaacaacgctgacccgcactgtcgaacgccgaggccagtacatccacgacgacctgttcggtcagtgctgaagaatcgacaatcatcgcgttcatgccgccggtttcagcgatgagcggaatagggcgaccctgagcgtccaggcggctggcgatattgcgctgcagtaacgtagcgacttcggttgaaccggtaaacatcaccccgcgcacgcgatcatcacccgtcagttgcgcgcccacggtttcaccccgacctggcagcaattgcaccacgcctggcggtacacccgcttccagcaaaatggcgatcccttgcgcggcaatcagcggcgtttgttctgccggttttgccagcacgctgttacctgccgccagtgcggcggcgatctgcccggtgaaaatagccagcgggaagttccacggactgatacacaccacaggccctaatggacggtgggtttcgttagcgaaatcatcccgcacctgtccggcgtagtagtggagaaaatcgaccgcttcgcgcacttcggcaatggcgttactgaaggtttttccggcctcacgcaccagaataccaatcagttgctgcatctggctttccatcagcacggcagcgcggtgcaaaatcgctgcgcgttcagccggaggcgtggcaaaccagattggcgcgttattaaccgcactttccagcgcctgttctacttcacgcggcgtggcttcacgcacatagcccacaatatctttcggttccgcagggttaataacgggcgacatctcacctgccgctaccggttgttccagcattggcaaggcctgccatttttgcagtgcactattgagcagggcagaggagagcgaggccaggcggtgttcgttagcgagatccagccctgccgagttgtcgcgcccgtgaccgtaaagatcgcgcggcaggggaattttcggatgcggtaatccagtttgcccttcctgttgcgccagtttttctacagcagtgaccggatcggcgaccagttcatccagtggcaaagaggtgtcggcaatacggttaacaaacgaggtgttagcaccgttttccagcaggcgacgcaccagatacgccaacagcgtttcatgtgtgccaaccggagcataaatacgacacggacggttaagtttgccgtcggcaactttcccggtgacctgctcatacagtggctcgcccataccatgcaggcactggaactcgtactgacccgggtagtagttctgccccgccagttgataaatcgccgccagcgtatgggcgttgtgcgtcgcgaactgcgggtagattagattcggcaccgccagcagctttttcgcacaggcgagataagaaacgtcggtatacaccttgcgggtataaaccggataaccttcaaggccgtccatctgcgcacgcttaatttcactatcccagtacgcgcctttcaccaggcgaatcatcagacggcgacggctgcgggtggcgagatcaatcaggtaatcgatcaccaacgggcagcgtttttgataagcctgaataacaaaaccgatgccgttccagcctgccagttccggctcgaaacagagtttttccagcagatcgagggagatctccaggcgatcggactcttcggcgtcaatgttgataccaatatcgtactgacgcgccagcagggtgagtgatttcagacgcgggtaaagctcttccattacccggtcatactgggcgcggctataacgcggatgcagcgccgacagtttgattgaaatgcccggcccttcatagatgccacgaccgttagacgctttaccgatggcgtgaatcgcctgctgataggaaaccatatacgcctgtgcatctgcggcggtcagcgcggcttcgcccagcatatcgtaagagtaacggaaacctttctcttccagcttgcgggcattggctaacgcttccgcgatggtttcgccagtgacgaactgctcacccatcaggcgcatcgccatatccacacctttgcggatcagcggttcaccgcttttaccgataatgcggttcagcgagcgggagaggctggcttcgttatgggtggaaaccagtttgccagtaaacagcagcccccaggtggcggcattaacaaacagtgacgggctacgaccaatgtgtgactgccagttaccgttgctgattttgtcgcgaattaacgcgtcgcgggtggctttgtcgggaatacgcaacaacgcttccgccagacacatcagcgccacgccttcctgcgatgacagcgaaaactcctgcaataacccctggaccatacctgcgcgaccactggcatttttttgattacgcagtttatcggccagctgatacgccagtttgtgcgcctgttcagcaactggctgcggcaggcgggcttgttccagcagcatagaaaccgcttcggtttccgggcggcgataggccgcggtgatcgcggcgcgggaaaccgactggggcaatatttgctcggcaaagtcgaggaatggctggtgtggttcctctgccggagtcggtgcttcatcgctctcattggccgcgccagaaagcagcgcaggtagctccggcagagtatcgctgttttccagttgttcgagataagaaaaaatcgcctgcttaattaaccagtgtggtgtgcgatcgatacgtgtcgcggcagacttaatacgctcacgcgtcgcgtcgtccagcttaacccccatggtggtggttcccatgccattactcctgttgttcagaaaggtgcaacttaacgttatcgtgaaatatccatgatgttgcaactttgtgcaaccatgttaaatgtgacatgcgtagcaagcttaaaaatgaatgaaatgttaataaaagaaatcgatatgacagggattaaaaaaataactcagactttttctctgcggcagttaacatttttgaaaggtgcaaccgcaaaaaatgtgagagagtgcaacctgatgaaaaatagtgtcgctgagcactaaaatttaatgtaaatggtgtgttaaatcgattgtgaataaccagcgcttccggcaggatacggtcgccctggtaaaacataaactctgttaccccgttccggtggcagatataacggcaagtttcgacattgccgataataattttttggagactttagatggctattagcacaccgatgttggtgacattttgtgtctatatctttggcatgatattgattgggtttatcgcctggcgatcaacgaaaaactttgacgactatattctgggcggtcgtagtcttgggccattcgtgacggcattatcggcgggtgcgtcggatatgagcggctggctgttaatggggttgccgggcgctgtttttctttccgggatttccgaaagctggatcgccattggcctgacattaggcgcgtggattaactggaagctggtggccgggcggttgcgtgtgcataccgaatacaacaataacgccttaacactgccggattatttcaccgggcgctttgaagataaaagccgcattttgcgcattatctctgcgctggttattttgctgttcttcaccatttattgcgcttcgggcattgtggcaggcgcgcgtctgtttgaaagtacctttggcatgagctacgaaacggctctgtgggcgggcgctgcggcgacgatcctttacacctttattggcggtttcctcgcggtgagctggactgacactgtacaggccagcctgatgatttttgccctgatcctgacgccggttatcgtcattatcagtgtcggtggctttggtgactcgctggaagtgatcaaacaaaagagcatcgaaaacgttgatatgctcaaaggtctgaactttgttgccattatctcactgatgggttgggggctgggttacttcgggcagccgcacattctggcgcgttttatggcggcggattctcaccacagcattgtccatgcgcgtcgtattagtatgacctggatgatcctctgcctggcaggggcggtggctgtcggcttctttgggattgcttactttaacgatcatccggcgttggctggtgcggtaaatcagaacgccgagcgtgtgtttatcgaactggcgcaaattctgtttaacccgtggattgccgggattctgctgtcggcaattctggcggcggtaatgtcaaccttaagttgccagctgctggtgtgctccagtgcgattaccgaagatttgtacaaagcgtttctgcgtaaacatgccagccagaaagagctggtgtgggtagggcgtgtgatggtgctggtggtggcgctggtggcgattgcgctggcggcaaacccggaaaaccgcgtgctgggcttagtgagctacgcgtgggcaggctttggcgcggcgtttggtccagtggtgctgttctcggtgatgtggtcacgcatgacgcgtaacggtgcgctggcggggatgatcatcggtgcgctgacggttatcgtctggaaacagttcggctggctgggactgtacgaaattattccgggctttatcttcggcagtattgggattgtagtgtttagtttgctgggtaaagcgccgtcagcggcgatgcaaaaacgctttgccgaggccgatgcgcactatcattcggctccgccgtcacggttgcaggaaagctaagggacttagcctgcggcggttttgtttggcttcagcagcgggttgcgctcccttaatgtgcctcgccatataaattgaatggtgcagggagcgcgcagggggcggccaatcgccgccgccccctgctgtcccggccttcggggaacgcttcagcgattttgacgccaccaacacccgagctgttattatgttccgggcaaaaagttagatttgataatcgcggatggacgaaattgcttgatacacccgcttatcagttttacatggaagctctgatgcattgagtctggacagttttgtcggctggatacggcgtttacgcggcatccggcaagaacacatggttctttgcaaacaatcccatctttctaccctggaataatcgtttatatcccttggcattacctctctttgtttacattccaacatcattttataaacattccgcttgtgtttttctttgccgtaatgataatcgctatcactgcgatttacttttctttgcatagattgactcagaaaaacgtttaagggtgggtggcatgtttgttccgtttctcattatgttgcgcgaaggacttgaagccgcgctgattgtcagtttgattgccagctatcttaagcgtacccagcgaggccgatggattgtgtgatgtggattggcgtgttgcttgccgctgcgttgtgcctgggcttgggtatcttcattaacgaaaccaccggcgaatttccgcaaaaagaacaggaactgtttgaaggtatcgtggcggtgatcgccgtggtgatccttacctggatggttttctggatgcgcaaagtgtcgcgcaacgtcaaagtgcaactggaacaggcagtcgatagcgcattgcagcgtggaaatcatcatggctgggcgctggtgatgatggtcttttttgccgttgcaagggaagggctggagtcggtctttttcctgctggcggcatttcaacaagatgtcgggatctggccgccgctgggtgcaatgctcggtcttgctactgccgtggtgctaggcttcctgctctactggggcggtattcgcctcaatcttggtgcattttttaaatggaccagcctgtttattctcttcgtcgccgcagggctggcagctggtgccattcgcgcatttcatgaagccggattgtggaaccactttcaggaaatcgccttcgatatgagtgcggtgctctcaactcactcgctgtttggcacgctgatggaagggatttttggctatcaggaagcgccgagcgtcagcgaagtcgccgtctggtttatttatctcatcccggcgctggtggcatttgctctgccaccacgcgcaggggcgacagcgtctcgctccgcgtaacaaatacgacgcaaactcttgcttagttacaacatactttaaagggatagtctcgtcatgaccattaacttccgccgtaacgcattgcagttgagcgtggctgcgctgttttcttctgcttttatggctaacgccgctgatgtgccgcaggtcaaagtgaccgtgacggataagcagtgcgaaccgatgaccattacggttaacgccgggaaaacacagttcattattcagaaccacagccagaaggcgctggagtgggagatcctcaaaggcgtgatggtggtggaagagcgggaaaatatcgcccctggctttagccagaaaatgacggcgaatttacagcctggcgaatacgatatgacctgcggtctgctgactaacccgaaagggaagttgatcgtcaaaggtgaggcaacggcggatgcggcgcaaagtgatgcgctgttaagtcttggtggtgcaattactgcatataaagcgtatgtcatggcggaaaccacgcagctggtgaccgacaccaaagcctttaccgacgcgattaaagcaggcgatatcgaaaaagcgaaagcactgtatgcaccgacgcgccagcactatgagcgtattgaaccgattgctgaactgttctccgatctggatggcagcattgacgcccgtgaagatgattacgagcaaaaagccgccgacccaaaattcactggtttccaccgtctggaaaaagcattgtttggcgacaacaccaccaaagggatggatcagtacgctgagcagctttataccgatgtggtcgatttgcaaaaacgcatcagtgaactggctttcccaccttcaaaagtggtcggcggcgcagccggactgattgaggaagtggcagccagcaaaattagcggtgaagaagatcgctacagccacaccgatctgtgggatttccaggctaacgttgaaggctcgcagaaaattgtcgatttgctgcgtccacaactgcaaaaagccaacccggaactgctggcaaaagtcgatgccaactttaaaaaggtcgataccattctggcgaaataccgtactaaagacggttttgaaacctacgacaaattgaccgatgccgaccggaatgcactgaaaggaccgattactgcgctggcggaagatctggcgcaacttcgcggtgtgctgggactggattaagcgttatgcagtataaagatgaaaacggcgtgaatgaaccgtcacgccgacgtttactgaaagtgataggtgcactggcgctggcgggaagttgtccggtcgctcatgcacaaaaaacgcaaagtgcgccgggtacgctttcaccggatgctcgcaatgagaaacagccgttttatggtgagcatcaggcagggatcctgacgccacaacaggccgcaatgatgctggtggcgtttgatgtgcttgccagcgataaagccgatcttgagcggttgtttcgcttgttgactcagcgttttgcttttctgactcagggcggagcagcaccagaaacgccaaatccgcgcctgccaccactcgattccggcattcttggcggctacattgcgcccgataatctcaccatcacgttatcggtgggtcactcattgtttgatgagcgctttggccttgcgccacagatgccaaaaaagctgcagaagatgacgcgtttccccaacgactcgctggatgcggcgttatgtcatggtgatgtgttgctacagatttgcgccaacacccaggacacggttatccatgcgctgcgcgatatcatcaaacacacgccggatttgctcagtgtgcgctggaagcgggaagggtttatttccgatcacgcggcgcgtagtaaaggcaaagagacgccgattaatttgctgggtttcaaagacggcactgccaatcccgatagccagaatgataagttgatgcaaaaagtggtgtgggtaacggcagatcagcaggagcctgcgtggacaatcggtggcagctatcaggcagtacgcttgattcagtttcgagtggaattttgggacagaacgccgctgaaagaacagcagacgatttttggccgtgataagcaaaccggtgcgccgctgggaatgcagcatgagcatgatgtgcctgattacgccagcgacccggaagggaaggtgatcgcgctggacagccatatccggctggcgaatccccgcacggcggagagtgagtccagcctgatgctgcgtcgtggctacagttattcactgggcgtcaccaactccgggcaactggatatggggttgctgtttgtctgctaccaacacgatctggaaaaaggcttcctgacagtacaaaaaaggctcaatggcgaagcgctggaggaatacgttaaacctatcggcggcggttatttttttgcgctgccgggggtgaaggacgcgaacgattatttcggaagcgcgttattgcgggtttaatgtttttaggcggataaggcatttgtgcgcagatgcctgatgcgacgcttgcgcgtcttatcatgcctacaatcagtgcgggtttggtaggctggataaggcgttcacgccgcatccggcgatcgtgcactgatgcctgatgcaaatcctgctgaaagcacacagcttttttcatcactgtcatcactctgtcatctttccagtagaaactaatgtcactgaaatggtgttttatagttaaatataagtaaatatattgttgcaataaatgcgagatctgttgtacttattaagtagcagcggaagttcccggcagtgatagtcagtcactatggagatcgcggatggtaacgtcctgtactggacatgttttagataatcaacgcgccaccactcgcggagttttctcctccggtagtcatctcgtcactttgcattttcaacctcatcctttcttttcatgtgttaccgacgccgtaaacggtgcgcgtagccgtttttcggcattttatccaaaagcaaactatggcttacaaggaagccaaccctctgatgttcgtgcgcataatcgcgctgccaacggcgcgtgtgatgaatacaaacaactcaaggtgctctccatgggaagacaaaaagcagtgatcaaagctcgtcgcgaggcaaaacgtgtgctgagacgggattcgcgcagccataagcagcgtgaagaagaatcggtcacctcgcttgtgcagatgggcggcgtagaagccattggtatggcccgcgacagtcgcgatacttcgcccatcctcgcgcgaaatgaagcgcaattgcactatctgaaggctattgagagtaagcagctgatattcgccacgggcgaagccgggtgcggaaaaacctggatcagcgcagcaaaagcggcagaggccctgatacataaggatgtcgacaggattatcgtcacccgtccagttctgcaagccgatgaagatcttggcttcttacctggagatatcgcagaaaagtttgctccctattttcgcccggtctacgacgtgctggtccggcgcttaggggcttcctttatgcagtactgcctgcgaccggaaatagggaaggtggaaattgcgccgttcgcctatatgcgtggacgtacctttgaaaatgcagtcgtcattcttgacgaggcgcagaatgtgactgccgcgcaaatgaaaatgtttttaacccgcctcggggagaacgtgacggttatcgtcaacggtgatatcacgcaatgcgatttgcctcgcggcgtgtgctccggattaagtgacgcgctggaacgtttcgaagaagatgaaatggttgggatcgtccggttcggtaaagaggactgcgtacgttcggcactttgccaacgtacgctgcatgcctacagttaagtgtgttatcggtgcagagcccgggcgaaccgggctttgttttgggtgtttatgcccggactagcgctttttctgaaacaaccatttttatttgcccctggctggtgaagtgtacgctcatcctgtggcttttttgtagttgctgatagagctcatcaggtattgctaagctctctgcatattcttgcggcgtatattggtaggctgcatgatgctgctgtttttgaaaacgcagcttattgtacagcgcccagacaattaacacgacggcattcgccactgccagcaaaaaatagaactgaagtcggcttctggcctcgctttgccagtaataacccgtcagcagatccatggcgaataagaatatgaacaacgcaaataatgtccacaagatggttgtggcaacataatcaaccagtaaacgtactggtgattgtcgggtcgtaataattaaattgttcatattaacctctcagaatcccgcgatcgggacttacccaacgggcgcgttgctttttaggcatcaacatgactcgtgtaaatgataccaatgtcgttgccaggctcagcatccagaaaataaccgggaaccaaataatccagaaaagcgatgaagtcagattatgctcatagcgattctcgatcatcaggctgacaataaattgcagtaaacataacgtacacaataatattccggcagtatgtgtcgcagcgatatgtgtcaattcaatatttaacggtacaccggcaagttggactgcgtaaataatgaaaccgaccaggcaggtgaaggcccatattgtcgtcaggcagtattcaaaaaacagcggccacattcgaaagttttctttgcgccacaaccttgtcatatttttgaggaatacttctgcaccgccctgagcccagcgcaggcgctgtttccacagcccttttaacgtttcaggcattaatatccagcacagtgcccgtggctcgtaaaaaatcgtccactgattcaactgcagcttccagctaatatcaatatcttcggtgatcatatcgtcactccagtaacccacttctgccagggcgctgcgacgaaatgcggcaataacaccggaaacggtaaatacgtttccatagatacgctgggttcgcttgatcaaaccaataattgaggaatactcgccaacctgaattttacccaccagggtagaacgtgttcgaatacgaggattaccggttacggcacccacacgcgggttgtacaacatcggttccacaatatatgccgccgcatcgcggtctaataacgcatcgccatcaatgcacaccagatattcacttttcgccgcggcagctccggttttaagcgcaatggctttcccctggttttgcgccagatgaatgacccgcaaatggggaatttgtgcagccatgcgatccaggatggcacgggttttatctgttgaaccgtcatttacggcaataacttcaatgttctcataacgctgtgctaaagcggcgtgtatggtttcctcaacgtttttctcctcattaaaacagggaatgataatggagatagacggattatctttcaactggggagctggtgcgttttctccccacggccagtggcgttcacgatagacccagaaatagacgccgccaacaatccacataatggacataaaaaacggccagaagaaaacgaacctcatcatcagttcaccagagtgaaagtacgctacgcataggggtatgcataacaccagacataatataaaaaacgatacgatgcgattaatcatttttcggataccaggctgttgaaaactcaggacgaataaggtctatttcaggttggttatgcagaaaattgtcgggataataaccatagtttttcactccattcagttgtaataggctcatccagtgagcgagttgttgcgaagaaatagcctgatgctgaccatttttctgccagttttgtgcctgtaattctaaaatagatttgtctttagcctgagggatgtttttaatttgattggtcaattgtattaaccattggtcagccgatttttctgcgacaccttccagataaggcatagccataatagcggtccagtcatagctttttaggaaatcagcataattctgtgcaaaccaggcttcactttcaggttgtattaccggaagtgcaaaaatatttcgtgcagttttaatatgtggaccgcgaatggcttttacgcgcgcactaagttctaaagtgaagtcagttaacgcacgacttttaaagcgggcccactgtttaaattgctccgggttttgtcgaatttcgctcagactcccgctaaagcctgcttgctgataagccgtgatagccggtgcactggcatcttcataatctgaaagcaaagcatcatcgtggaacaatatgccatcaaaagcagcatgtccggcaagatcttcatataacatgccaacttgtgctctgactctgtcatcgaaaggagagagacggtgatattgttcaggatgaatttgtgcttttttctcccctgttggtaagtattttactcgcgttaatgtgggatctaaatcccagcttaataccggcatccacgcatagatgtttacacctgagcgggtacgtaattgccaggcaacccgactaaaaatatctgctttcattggtagcaaacgatttggaaaccagacctctttgaccagcccatcaccatcgggatcagcaaatgcctgcaaatacacggttgatatttgcatatctttcacccgctgaattagcacatcaatattgcgatccatttgctggaggttttcgtcataaacgtaatcaagatcgatatgcattatccgttgtggtgatttttcctgtacggtaataatttgctgggcaaactcttttaatgagggattattggcgattaatacccgcggaatggaatccaattgcgacgcatttgccaaacctgattcaagggtgaagaacatgtcataaccgagtttttttaattcctctatcgctatgccattcgcttcgccataaggccaaacaaaaacgtgtggatttacctcaacctttgtacgcaggtattccgtcatttttacagcatccagacgaattctttcccggtattctgctgcggtttcataccgtgcgtggtcagtaaaatatgcacgatttacatatacaggcaataagctgccggtggcattagcctgaataccgtagtgagaattccatgtatgagaagcgagctcaacgagccgggaacgcgcaacttctcgcacttgttgccacgtggcaaaatattctcgatcgaccaactcatcgccaaattttacttgtttatccgctggcgtatcgacccaactgccgacgggggcccatacagcaggccactggaaggcctgaagaattgggaagacgcgggtataaaaactctggtagccgtcatcaaaagtcagcactacagctttttccggtagcggttttcctcctcgatgtgcttcacgaatttgagcaatactgaccggttgataaccgttctcgcgcagccaggcaaattgttcacgcagtgctgatgtccgcactgacataaaacgctggtcggcagcttcgtcttcaacgttatgccatgaaatcgctacaaaaccattatgcggccacggttgctcggcgagtaaagattcgcgatcctgtggcggtataaatgatgttcttgactggctaatgcacgcggtgagcataattatactcaccagcatcaggagatatttatttccattacgtaacatatttatccttaaaatctgaatgtcatatcgaattcaacgtataagttgtgttctctgtcaccgtcataaggtcgtttttcccagcgtagcgttgcgccagcatcaatcacgtcattccaactaatgcgttgcccgtagccgagttgggtgacgacatccgtgccataatgtttttgccaggaggcaccaacacctgcgctgaatatttgctcccagctattttcatagcttcgccataacaaatggcttgcctcaaatgccggaacaatatcgaacgtttttatagggttgtagtatggggtatcgtgttctgtattttgttcgtaatacagactgggtaggaaatcgacaatcaaatatggtgaagaccagatgcgttcctgaccctcaagtgagacttcatgacgctggttactgtcggaaaaatcagtgaaagcccaggagacaccgtacttacgccgctcattttgataccagcgaacataagcctgagcactgttgcctgtaacaccatttttcattgcccgtaatggaacgcggtgagagaggcgttccagttgcgaaccaatacgccagttatcattaaaatcataccagccagacaggcgcgcgccgggtttatgctcatgattgaaaacgcgttcagcgtactctgcctcgagccagatattacgtgaccgccactcaacacccgcaagccagtcgcgaacaatcccttttccttcgctaaattgtccatcggcataaccgaatccagcaaaaccgcgccagttatccttcagcggtggtgaataaacgatggtggttaagtcgacatcatgtttaccactatccgggccttcggcatcaattcctgttgagccagcgatacgaagctctgcaagattatgtacatcaaccgcacgttttaatcgtacaacgccgggatcttgcggttcacgttcgacaacatcgtgcgttaagacagctgcctgctgccattcttgtaacgttaatgctgtccaggcttgttcaacctccagattaatattacgtggctcgatcacttctgctttttttaattcattttctgctgcacgaggccaaccgcgggcttgtaacacactcgcgtaatcaatgcgcagtccctgatttcctggtgcgttataagcaagctctctggctgtcatttcagcctgaggaagatcattactatattttgctacggttgagagaaacgaatgcccctgtaaccaggtatcattcgggatgctcgtaggcgtgcccattaaccgaaggaaaggcggcgaagtattaatggtatgttgggtgacagttagcgcgcccggataattttcactctccaggtggctgtaaaagagatccgcaagttcttcatcggataaatccggggcaatggtctccttgtgataaaagagctcggtcattattgactgtgcttttttcggctgatgatctttgagataagccgatgcaacccaatattgcccccagggcggaataatttgccccgtcttttttaatcgctgatagtgagaaataacgtctttataacgatcgcgagttaataacgcgccaagatgatcaacctgaatacgctggtactgggcagtgcggtctgggttatcgtgccacagaatttctaatgcagcgtattgggcgagggcgcgatcggcaatggcataacgttcactttcactgcgcgtaggcataaacgacagtctgaccagttcggcatgaatatcagcgcgaatatctggcgttaaattggcatcgtcaatcgcggcagcaagttgattattacgtaatgcctgcacgtattctgtgggatattgttgcgtagatgcattttcaggtaatgactctgtcatcgcccgtaattcatcctgatgacgccccgccagtttatagatataggcttctgcgagtaaattggctttgtccggtgctccagagttaagctgcttaagtttaaccagcgcagtatcatagtgaccagcatctgccagggttaaaatttgtccccgttgataatccttattttgcggctccagagagagcgccttttgccacagtgtaagcgagttttgccattgttgcaggttacgataagcgacggcgacagctgcataaccacgcgctggtaattgctgatgacggtagcggttgtaaacggtaataacctgtttatcttgcccggcccataaggcaatctgtaaccagtcagcaatttggttattgctgagtgctgattttagtgcaaaccatgacaaagctggctgagtattacccttgcgagcttcaataatcaatgcatcataggcgttattaacagcactcttcgccgcgggactcgctgctaaaaatgcggcagtaagaagtttcaaagcccatttggttttcgggcacctttttctgctacttgaatacatcctgtattactccatgtattgccaaaatctctctctgtatctaattacaggtaactgaaaagaaagatatttttgcacctcataatccgttattaaacgcggaagagagacgtgaattgttgatgatgagaagaagaaatgatgagcagagtgtccatataaaatccttttctcgcccgaaaatccattccaatgatgaggatcttcaggaatacggcataaatcccaatgcctttttcaaaataaattaggattaaaataattaaatcagtaaattccgatgcatgatttcggatttttcgaaagtcctgatgaaaggctgcgctacggcactcacggatttaattgttattcctaatgtatctatgaattaatgttttataaggattttctataaccatttataagtattttcaagcctggcttgttgcaaacaatgtataaagcacttaggcaataataattacattcagcaactatcatcatcggtattgtttgtgggcggaatttcatattgacaacagtacagttcttatatctattaataatagaaagggatctacaacctacagattggtgtagctttatggaaaaagactatttgagaattagtagtactgtattagtgagcttattgtttgggcttgctttggttttggtgaatagttggtttaatcagccaggcgttgaggaagttgttccacgatcaacctatctgatggtaatgattgctttattttttatcgatactgttgcatttatttttatgcagttgtatttcatttatgaccgtaggcaattttcaaactgtgtacttagtttggcttttctgagttgtttgatttactttgttataaccgtcattatcattcagcaaattattgaggagcgtttgacaagcagtgttgtccaaaatgacattgcaatctattatttgtttcgtcagatgagtttgtgcatattaatatttctggcattggtgaataaagttagtgaaaacacaaaacagcgcaatttattttccaaaaaaatgactttgtgcataagtttgttttttgtttttggggggccgatagttgctcacatactttctagtcattatgagagctacaatttacacattgccgagttaaccaatgaaaatggtcaggtggtttggaaagcctcatatgttaccataatgattttcatgtggttaaccttgctttcggttaatctatactttaatggtttacgctatgatatctggaatggagtgacggtgattgctttttgtgccgtactgtacaatatctctctgttatttatgagcaggtatagcgtgtccacttggtatattagtcgcactattgaagtagtcagtaagttaaccgttatggtaatatttatgtgccatatattcagtgcgctacgagtaacaaagaacattgcacatcgcgatcccttaaccaatatatttaacagaaattatttttttaatgaactgacagttcaatcagcatcagcccaaaaaacgccttattgcgtcatgattatggatatcgaccacttcaaaaaagtcaacgacacctgggggcatccggttggcgatcaggtgataaaaacagtggtgaatatcattgggaaaagcatacgaccagatgaccttttagcgcgcgtcggcggcgaagagtttggcgtcttgctgacggacatcgatactgaacgtgcgaaagctttagcggaaaggattcgggaaaatgttgagcgtttaactggcgataatcctgaatacgctataccacaaaaagtgacgattagtattggcgctgttgtgactcaggaaaatgcgttaaacccaaatgagatctatcgactggctgataacgcactttacgaggcgaaagagaccgggcgtaataaggtggttgtgagggatgtggtgaatttttgtgagtcaccataaagcggcattttgatcctacccacgtaatatggacacaggcctaagcgaggttcttgttttcaaattgttccggactgaggccgccacaccaactgtgccgccgccaccgattgtaatcacattcgatataattaaacaccgttgcccgcattatttcccggctgataaagtgttctccatggatacattccactttcagcgaatgaaagaagctttccacgcaggcattatcgtagcagcaaccttttgcgctcatacttccacgcagattatgccgcttcagttgcgcctgataatctgctgaacagtactggcctccacggtccgtgtgaacgataacgttccggggcctcttacgccgccacagcgccatctgcagggcatcgcaggccagttgcgccgtcatgcgtggcgacattgaccagccaataacggcacgtgaccacaggtcaatgaccactgccagatacagccagccttcatctgtacgtaagtacgtgatgtctcctgcccacttctggttcgggccactggcgtaaaaatcctgctccaacagattttctgacacaggcaggccgtgtgcgcggtagctgaccgggctgaacttccgggaggcctttgccctcagtccctgacggcgcaggcttgccgccacggtttttacgttaaaggggtaaccctgagcacgcagttcatccgtcaggcgtggggcaccgtaacgctgttttgaccgggtaaaagccgcgaggacaacgctgtcgcagtgttggcggaactgctgacgcgtgcttatccttgtccgccgctgacaccacgtataccagccgctgcgggccacccggagcacgcggcacattgctttgatgctgaactcagcctgatgtttttcaataaagacatacttcatttcaggcgcttcgcgaagtatgtcgcggccttttggaggatagccagctcttcatcccgttctgccagctggcgtttgagacgtgcaatctcggtagacatctccagttcacgttcagaagacgtctgctgattttgctgtttactgcgccagttgtagagttgtgattcatacaggctgagttcacgggctgcggcagtaacaccgatgcgttcagcaagcttcagggcttcactgcgaaattcaggcgaatgctgtttacggggttttttactggttgatactgtttttgtcatgtgagtcacctctgactgagagtttactcacttagccgcgtgtccactattgctgggtaagatcagtgcctggcacacgcgtttgatggaagacggcgttcaggcaatgcgcgattatcttgccggactggatatcgcttcgccagagcatcaggttctgatgaacgtaacagcaaaaagcgaggtcgctccgtcaattatcaaagaaaatctctcattacacttaactcatacggtgaaatggactgaatctctcgatacatttctgaatatgccaaccccggtagctttccttgaaataagtaataagccctatttggggaatatgttaaatgattttgctggcgtggatcagcaacgagttatgcattgtcgtaaagcatttagtgatgcaaaggtattcaaatgattcctgattatttaacttttattcgctttcaggataaacgaaatctgatatacatttatgctattggacttattctgataggcttttattggaagaatgcagggtttacttttccatcagaggatattggtgtagttagtgggattctggctctggtgctgtataattttatttttgatctcaaggcgtactgggcttataaatgcgtcacgaagaatatcgatttttcgtggtttaagaaaaagcagaaccacaaaatagaattatttcttacacaacctctggtggcaggatttctgtcgttaatcatgttgagtgcaatgagttgggggctataccagcttctaccctcgttatatgcgctgttcctgatttcgttacttgggccgttggtcatctttctgctgtttcggatgatccgcaccagttatgtcaagcaggtcgctatttcagtagcgaaaaaagtaaaatataaaagtctgactcgctatgtgctgctttcggtgtgcatctcaacggttgttaacctgcttactatcagcccgttgcgtaacagtgattcttttgtgacagaggggcagtggttaacgtttaaatcgataattgcattgctcattctttgtggcgtagtgttggcgattaatctgttttttctgcgcttctccaagcggtacgcttttctgggcaggctttttttgcaggaaatcgatctgtttttctccagtgaaaatgcgttgtcgaccttttttgccaagccgctttggcttcggttattcatattgctggttattgaagtgatgtggattacgctggtgtcggtattggcaacgcttgtagaatggcggatttggtttgaagcctattttttactctgctatgtaccgtgcttaatttactattttttctattgtcgattcctctggcataacgattttatgatggcatgtgacatgtatttccgttgggggcattttaataagtgaggaagtgataggaagtgaccagataatacatatatgttctgtactctcttgcgcattttgattgttgactgagtaaccagacagttgatgtgcacgatttcccctcgccctaacagacgtgggcgggggcacccggtgtgtgcaatatacgaaaaaaaagcccgtactttcgtacgagctcttctttaaatatggcggtgagggggggattgactcgcttcgctcgccctgcgggcagcccgctcactgcgttcacggtctgtccaactggctgtcgccagttgtcgacccccggtcggggcttctcatccccccggtgtgtgcaatacacgaaaaaaaagcccgtactttcgtacgagctcttctttaaatatggcggtgagggggggattgactcgcttcgctcgccctgcgggcagcccgctcactgcgttcacggtctgtccaactggctgtcgccagttgtcgaaccccggtcggggcttctcatccccccggtgtgtgcaatatacgaaaaaaaagcccgtactttcgtacgagctcttctttaaatatggcggtgagggggggattgactcgcttcgctcgccctgcgggcagcccgctcactgcgttcacggtctgtccaactggctgtcgccagttgtcgaaccccggtcggggcttctcatccccccggtgtgtgcaatatacgaaaaaaaagcccgtactttcgtacgagctcttctttaaatatggcggtgagggggggattcgaacccccgatacgttgccgtatacacactttccaggcgtgctccttcagccactcggacacctcaccaaattgtcgttcctgtcttgctggaacgggcgctaatttagggaaatcatgacctgaggtcaacaaactttttgaaaaaatcgcgcgtttattcaaacttcaatcaatgtgtggttttaataagcgaaatctgctttttttgccaccgaccacggatttgttatgctggtggcctttgtagatcataacgataagtgcgaataaatttcgcacaacgcttttcgggagtcagtatggatatcatcttttatcacccaacgttcgatacccaatggtggattgaggcactgcgcaaagctattcctcaggcaagagtcagagcatggaaaagcggagataatgactctgctgattatgctttagtctggcatcctcctgttgaaatgctggcagggcgcgatcttaaagcggtgttcgcactcggggccggtgttgattctattttgagcaagctacaggcacaccctgaaatgctgaacccttctgttccactttttcgcctggaagataccggtatgggcgagcaaatgcaggaatatgctgtcagtcaggtgctgcattggtttcgacgttttgacgattatcgcatccagcaaaatagttcgcattggcaaccgctgcctgaatatcatcgggaagattttaccatcggcattttgggcgcaggcgtactgggcagtaaagttgctcagagtctgcaaacctggcgctttccgctgcgttgctggagtcgaacccgtaaatcgtggcctggcgtgcaaagctttgccggacgggaagaactgtctgcatttctgagccaatgtcgggtattgattaatttgttaccgaatacccctgaaaccgtcggcattattaatcaacaattactcgaaaaattaccggatggcgcgtatctcctcaacctggcgcgtggtgttcatgttgtggaagatgacctgctcgcggcgctggatagcggcaaagttaaaggcgcaatgttggatgtttttaatcgtgaacccttaccgcctgaaagtccgctctggcaacatccacgcgtgacgataacaccacatgtcgccgcgattacccgtcccgctgaagctgtggagtacatttctcgcaccattgcccagctcgaaaaaggggagagggtctgcgggcaagtcgaccgcgcacgcggctactaataaagcatcaggattcctgctatccttggcgggaattgaatacaggagagagttatgtatcccgtcgaccttcatatgcataccgttgccagcacacatgcatatagcacattaagtgattacattgcccaggccaaacaaaagggcattaaactttttgcgatcaccgatcatggcccggatatggaagatgcgccgcatcactggcacttcattaacatgcgtatctggccgcgagtggttgatggggtagggatcctgcgcggcatcgaagctaacattaaaaatgttgatggtgaaattgactgcagcggtaaaatgtttgactcgctggatctaattattgccggttttcatgagccggtttttgcgccacatgacaaagcgaccaatacacaagcgatgatcgccactatcgccagcggcaatgtgcatataataagccatcccggaaatcccaaatatgaaatagatgtgaaagccgttgctgaagcagccgcgaaacatcaggtggcgctggaaatcaataattcctcatttttacactcacgtaagggcagtgaagacaactgtcgtgaggtagccgcagcggtacgtgatgctggaggttgggtggcattaggctcggattctcacaccgcgtttaccatgggggaatttgaagagtgtcttaaaatcctcgacgcggtagattttccgccagagcgcattttgaatgtttctccgcgccgcttactgaacttccttgaatctcgcggtatggcaccgattgcggaatttgcagacctttaattactagtaatggaaatatattaatgaacgagttttctatcctctgtcgtgtgctgggttcgctctattaccgccaaccacaagatcctttactggtgccgctgtttaccctgattcgtgaggggaaactggctgcgaactggccactggagcaggatgagttgctgacacgtttgcagaaaagctgtgatatgacgcaagtctctgccgattacaatgcgttgtttatcggcgatgaatgtgctgtgccgccatatcgtagcgcatgggttgagggcgcgacggaagcggaagtgcgcgcttttctttctgagcgagggatgccattagcggatacgccagccgatcacatcggcacattgctgctcgcagcttcctggctggaagatcagtcaacggaagatgagagcgaagcactggaaacactgttcagtgagtatctgttaccctggtgtggtgcgttccttggcaaagtggaggcccatgcaaccacgcctttctggcgcaccatggcaccgctaacccgcgatgccattagtgcaatgtgggacgagctggaagaagattctgaagaataagtgtgatctacgtcactcataactgcaacggataatttgttgttgcataaaatgtgtgctcgatctcattcatggccgcgttttctgctatcatgcgcggcatgaacatacttctctctattgcaatcacaacaggcattctctccggtatctggggatgggtggctgtttccctgggcttactaagctgggcgggcttcctgggctgtacggcctactttgcctgcccgcaaggtgggctgaaagggctggcgatctccgctgcaaccctgcttagtggcgtggtgtgggcgatggtcattatttacggtagtgcactggcaccacatctggaaattctcggttatgtcataaccggtattgtcgcgtttctgatgtgtattcaggccaaacagctgctgctttcatttgttccggggacgtttataggcgcatgcgcgacgtttgccgggcagggtgactggaaactggtgttaccttcgctggcgcttgggctgatatttggttacgcaatgaaaaacagtggcctgtggctggcggcgcgtagtgcaaagacggcgcaccgtgagcaggaaatcaaaaataaagcgtgaggggcactcacgctttcgcttaaacagtaaaatgccggatgataattccggcttttttatctgtcaggattccggtggaaccgacatatggcggtatttcaccagaatgtcattctgccgttctgctttattttgcaaatcccacagaccacggtcgataccatcattaatcaggaaaatgacccctgtttcgatagccgacatcaggcacagcataacaggttcgttcgaggtgtaacccacttccccttcaagcaagcgctggtagtcaataaagcggaaaaccccggcctgaacttcataggaaagtatcgtcttactggtgttcaccgaagaaaggatctcgccggtactcacattgacgacgcgcaggttcacggcaatctgatcgagctggtattgcgtgtcggcaccgatgccaaaatatcttgccccaaccccgccagatttgacgttgctttcataaccgataatcgaaccttcaaccatgatatttgccgccgttaaagattgcagcgggattcggttattaatggcaaccgtgccgttttcttgtgccgcacgaataatcttgcgctcgttaagcaggttttgtaagccctggcgctccagcggtataaaccagcgagaatctttcagtgccgtgaccagcattgccgtggcgctttgcggaacagcagtggagaagttacttgccgggtagggtttaaattgcccggtttcgtcctgaatgttgtataccgaaacaaagattttacccgtcggcgctggcagatgggtcaaatctttgtagctctgagcacgaggcattaatgtcggtctggcggcttctttaggcggggcggttaagcatccgctcagtaacatgacggcaaccaaaagaaataagcgctgcatgattattttccttatgaagctggggcttaaaaatcggttgagttattttgtaaacccgaaacctggatggtcgaggtttgtccggttttacgatctgtcacgttcaactgcaattgaccatcgcggttggcaatatcgacaatataatcgttggtcaccatgcggcccggtttaccggtattaatattcgacagtagcccacctaaaatttgtgactggatggcctgagtaaagttatctaacgctgagggtgtttcaataccaaagtcatcgttatagctcggatctttataagagttttgggcctgagcgctatttaataaaaaagcgccattatttgggttaccaccaaagtttggattacggaactggaaagtcatggttccagcccaacttaatggcgaaataagcatgagtagaactactgcatgtttgacacgcattgcagcctccgaacaattttttatttagaattcatcatgcgccaaatcgcccgtacttaataacgcctgatttatctggcgacgatttagtgcttcttcagtttgaatcagtgcaaagacgacagttttctcgaagtctcttttcaacggaaataaaaaagtctggaaaataacgtcctgattgaccgttatagtgatccagcttccccatcgtgcactgggcctttcattaatcgttaagttacccgtatagtcactttcccatttatcactaaaggctcggtaaaaatcatggccaatagatgaaacagtatggtcagttagcaatcccgggacttctacctcaacggcgtgaagattccctgcggcgaacagaaattctgccgccacaatccagcgtaaataacgtttcatggctttatcgcctgaggttatcgtttgcccaggaaaccgcttgtgtccggttttttacggctatcttcttgaaaagattataaagatgcgttttaaccgtattttcgctgatgaacaacgaacgagcgatctcgttattagacgcgccgatacgcagcttattcaggatctctttttcccgatgagtaaggagggctgattccgtgctgttataacgatagttacctgaatgcgtaatcaggtagctggcaagcttttgcgtaaagtagcattcgccgcgcaggacgccttgcaacccattgacaacacgttcttgatcctccatggaataaaaaacgccgttgatatgaggccagttttcaatgtcgcggtacgggtaatcttcaggcgtatttagcaacaatattttgatattgttgtttttcctgctcaaagtatcctgccaataatggataagctttttatccgcttccatcatatccagaagaataatagagcctgaagagatatcgtccagagaacgttgaatattatgtaattttcctgtaattgccagcgattgtttaaggtgctgcaagagagctgtcgcctgcaaagaagatttagtgatcaacaataatgtatgaccatgaatactatggacttcattaaacatgatgaaaccccgctttttttattgatcgcacacctgacagctgcctctaaaatagaagcaccagaagtactgacagatgttgcactgctgtgtgtagtaataaatcagccctaaatgggtaaaatataaaactaatggattacatctgatttcaatctagccattacaaatcttaaatcaagtgttaaacatgtaactaaatgtaactcgttatattaaaatgttaaccttaaggttttattaagtttagaaatgatagaaaagttgtacatttggtttttattgcacaattttaaaaaatcatacaaatggtgataacttactaataatgcatataaaaaatatttcggtgtagtcctttcgtcatgtaaaacgttcttgttttttctccacacctccgtggacaattttttactgcaaaaagacgaggtttgtcacggcttgtgcgcaagacatatcgcagcaatcagcgacgggcaagaagaatgactgtctggtgctttttgatagcggaaaacggagatttaaaagaaaacaaaatatttttttgcgtagataacagcgtatttacgtgggttttaatactttggtatgaactaaaaaagaaaaatacaacgcgcgggtgagttattaaaaatatttccgcagacatactttccatcgtaacgcagcgttaacaaaatacaggttgcgttaacaaccaagttgaaatgatttaatttcttaaatgtacgaccaggtccagggtgacaacatgaaaaacaaattgttatttatgatgttaacaatactgggtgcgcctgggattgcagccgcagcaggttatgatttagctaattcagaatataacttcgcggtaaatgaattgagtaagtcttcatttaatcaggcagccataattggtcaagctgggactaataatagtgctcagttacggcagggaggctcaaaacttttggcggttgttgcgcaagaaggtagtagcaaccgggcaaagattgaccagacaggagattataaccttgcatatattgatcaggcgggcagtgccaacgatgccagtatttcgcaaggtgcttatggtaatactgcgatgattatccagaaaggttctggtaataaagcaaatattacacagtatggtactcaaaaaacggcaattgtagtgcagagacagtcgcaaatggctattcgcgtgacacaacgttaatttccattcgacttttaaatcaatccgatgggggttttacatgaaacttttaaaagtagcagcaattgcagcaatcgtattctccggtagcgctctggcaggtgttgttcctcagtacggcggcggcggtaaccacggtggtggcggtaataatagcggcccaaattctgagctgaacatttaccagtacggtggcggtaactctgcacttgctctgcaaactgatgcccgtaactctgacttgactattacccagcatggcggcggtaatggtgcagatgttggtcagggctcagatgacagctcaatcgatctgacccaacgtggcttcggtaacagcgctactcttgatcagtggaacggcaaaaattctgaaatgacggttaaacagttcggtggtggcaacggtgctgcagttgaccagactgcatctaactcctccgtcaacgtgactcaggttggctttggtaacaacgcgaccgctcatcagtactaatacatcatttgtattacagaaacagggcgcaagccctgttttttttcgggagaagaatatgaatacgttattactccttgcggcactttccagtcagataacctttaatacgacccagcaaggggatgtgtataccattattcctgaagtcactcttactcaatcttgtctgtgcagagtacaaatattgtccctgcgcgaaggcagttcagggcaaagtcagacgaagcaagaaaagaccctttcattgcctgctaatcaacccattgctttgacgaagttgagtttaaatatttccccggacgatcgggtgaaaatagttgttactgtttctgatggacagtcacttcatttatcacaacaatggccgccctcttcagaaaagtcttaatttgttgaaatatcgagcataagatgaatctggagagaatggtctgctgcgaatcagccaacctgaaagtatggataacacaaccctcaaggatgactaatcattgaggaaatagaataaatgttcagaccttttttaaactctcttatgctcggcagtttgttttttccttttattgccattgctggaagcaccgtgcaagggggcgtgatccatttttatggccaaattgtggaaccggcatgtgacgtcagcacccagtcatcacccgtagaaatgaactgcccacagaatggttctattccgggcaaaacctactccagcaaagcgttaatgagcggcaatgtcaaaaacgcgcaaatagcctcagtaaaagtgcagtatcttgataaacagaaaaagctggctgtaatgaacatcgaatataactaagtttctgaacaactcacgttgctgagcagaaaaatgcgatttaaccaaaaagcctgctgtacacttaagaaacaagaaggtgtaaggaggcgttatgaaaacgcgtattcatgttgtgcagggtgatattaccaaactggccgttgatgtgattgtgaatgcggctaatccgtcattaatgggaggcggcggcgtcgatggggccattcatcgcgcagcgggtccggccctgctggatgcttgtttaaaagtcaggcaacagcagggcgattgccctacggggcatgccgttattacgcttgcaggcgatcttcccgctaaagccgtagtgcacaccgtcgggccagtctggcgtggtggtgaacaaaacgaagaccagcttttgcaggatgcctatctcaatagcctacgactggtggcggcaaacagctatacgtcagtggcttttcctgcaatcagtactggggtttatggttaccctcgtgcggcagcggctgaaatcgcagtaaaaaccgtttcagaatttattacccgtcacgctttacccgaacaggtatactttgtctgttatgatgaagaaaacgcccacctctacgaaagactccttacccaacaaggagatgaatgatttgccccggctggcgagcgcggtgctgccactgtgttcgcaacatcccggtcagtgtggcctttttcctctggagaaaagtctggatgcgtttgccgcccggtatcgtctggccgaaatggcagagcatacgctcgatgttcagtattacatctggcaggacgatatgtcgggtcggttactgttttccgccctgttagccgcagcaaagcgtggcgttcgcgtccgtttgttgctggacgacaacaatacgcccggacttgacgacattttacgcttgcttgacagtcatccacgcattgaagtccggctttttaatcctttctcgtttcgcttgctgcgtccgcttggttatatcaccgacttttcccgtcttaatcgccgtatgcacaataaaagtttcactgtcgatggcgtggtgaccctggtgggaggacgaaatattggtgatgcctattttggagcaggggaggagccacttttttcggatttagatgtcatggcaataggacccgtggtagaggacgttgccgatgatttcgcccgctactggtattgcaaatcggtttcacccttacagcaggtgctggatgtcccggagggtgaaatggcggatcgcatcgagttacccgcctcctggcataacgatgccatgacgcatcgttatttacgcaaaatggaatccagtccatttataaatcatctggttgatggaacattgccgcttatctgggcgaagacacgtttattaagtgatgatccggcgaaaggggagggcaaggcaaaacggcattcactgttaccgcagcgcctgttcgatatcatgggctcacccagtgaacgcatcgatattatctcttcctattttgtaccgacacgcgcaggtgtggcgcaactcttacggatggtgagaaaaggggtaaagattgcgatcctaaccaattctcttgccgctaacgatgttgctgtcgtccatgccggatacgcgcgctggcgcaaaaaattgctccgctatggcgtggaattatatgaactcaagccgacgcgtgaacaaagtagtacgttacacgatcgcggcataaccggtaattccggagccagcctgcatgctaaaacctttagcatcgatggtaaaacggtgtttatcggctctttcaatttcgatccgcgttcaacattgctcaatactgaaatgggcttcgtgatagagagcgaaacgctggcacagttaattgataaacgctttattcagagccagtatgatgcggcctggcagctccgtctggacaggtggggacggatcaactgggttgatcgtcatgcaaagaaagagattattctcaaaaaagaacccgccaccagtttctggaagcgggttatggtcagactggcgtcgatattgcccgtggaatggttattgtaaatgtggcttaacgggctggtgctttatcgttctcacgcttaacaaccggtttaccagagaacaaaaacttcagtaacgggatgcgcaaatgaatttcatacagaattatcgcaatccctactacaaatatcaggccacagagaaaaccaagccagttggaggtgatgtgcggtgtaatgtatgcgccgaaaaacagcgttaacgggtggtgaaccagatagataaacagcgatgcgttaacaaaataagtcacccgcgctgactggaagttaagcaaacggtggccaaaggagaagaccacattcaccatccacagaccgaggaccatggtgatcaccgactcggtttcgtacatccaggcatcgccactgccatagcgctggttgagtaaataagcgacaaacgccaatgctgctgcaagggtacagccacgagacggcgtggtaaacaaggctttaagatgagggaaaatgaaagccagtgcgccgaggataaagaacggcaaataaaacagcgtttgcatgacaataaaattgaacatgccattactcagaatgggcggatacacaataaaaatcgttcttcttattaccgcataaccgatgccgaggcataaaaaaatcaccgatagttttaccatcgagaattttttattcgttttatcagaattttctaaattatttctgatgcgcttaaatatccatacgcacagcgtcgtcatgaccactaacaccagtaaaaaccacaggtgtgatattaattcccaggccaacgtattatatttgtcatacaatgacagcccaggccaactttccgcttttcctttgacatattgcagcataataaattgcggtaatgtcagtagggggatggctgttaacatcgggatacctacacgttcgacacgtactttccaccattttttcaagggatagcgtaaaaaaagcatgtaggaaaagtagccggatataacgaaaaatacctgcatgcggaacgagtggatgaagtcattaaaaagggtcagccacaatgatgattcggcgctattcacatgccatgtatggctcgaatagattaaagaaatatgaaaaggtatccctaacaacatcagccaggcgcggatggagtcgaggaaatattcacgttgcgcgggtactgggttcatatatggttaactaatctcggatttttcgtcttatccctgtcgggttatgcctttaggcttgttgccatagtgacaccgacctgaccgcgccaggcgcaggcttcaaggtttttatgcatagcatcatcgctaccactaaccagaatggaagcgtctgtaagacggttgataaataaatttgctggcaaaccctacacgaagtcgatgcttctgtctttaggagaagcacggaaagtgaaaacggttgcaatcaggtgcttaatccatgagccagcgtgctgaacgataccgggattctgttgtcggaatggctggttatccattaaaatagatcggatcgatataagcacacaaagggggaagtgcttactaattatgaaacataaactacaaatgatgaaaatgcgttggttgagtgctgcagtaatgttaaccctgtatacatcttcaagctgggctttcagtattgatgatgtcgcaaagcaagctcaatctttagccgggaaaggctacgagacgcccaaaagcaacttgccctccgttttccgcgatatgaaatacgcggactatcagcagatccagtttaatcatgacaaagcgtactggaacaatctgaagaccccattcaaactcgagttctaccatcagggtatgtacttcgataccccggtcaaaataaatgaagtgactgccaccgcagtcaaacgaatcaaatacagcccggattatttcactttcggcgatgttcagcatgacaaagatacggtaaaagaccttggctttgccggttttaaagtgctttacccgatcaacagcaaagataaaaacgatgaaatcgtcagcatgctcggggccagctatttccgcgtgattggtgcaggtcaggtttatggcctttctgcccgcggcctggcaattgataccgccttgccatcgggtgaagaatttccgcgcttcaaagagttctggatcgagcgtccaaaaccgactgataaacgtttaaccatctatgcattgcttgactcgccgcgtgcgacaggtgcttacaaattcgtggttatgccagggcgtgacacggttgtggatgtgcagtcgaaaatctatctgcgcgataaagtcggcaaactgggggttgcaccgttaaccagtatgttcctgtttgggccgaaccaaccgtcgcctgcaaataactatcgtccggagttgcacgactctaacggtctctctatccatgccggtaatggcgaatggatctggcgtccgttgaataacccgaaacatttagcggtcagcagcttctccatggaaaacccgcaaggctttggtctgttgcagcgcggtcgtgatttctcccgctttgaagatctcgatgatcgttacgatctccgtccaagcgcatgggtgactccgaaaggggagtggggtaaaggcagcgttgagctggtggaaattccaaccaacgatgaaaccaacgataacatcgtcgcttactggacgccggatcagctgccggagccgggtaaagagatgaactttaaatacaccatcaccttcagccgtgatgaagacaaactgcatgcgccagataacgcatgggtgcaacaaacgcgtcgttcaacgggggatgtgaagcagtcgaacctgattcgccagcctgacggtactatcgcctttgtggtcgattttaccggcgcagagatgaaaaaactgccagaggataccccggtcacagcgcaaaccagcattggtgataatggtgagatagttgaaagcacggtgcgctataacccggttaccaaaggctggcgtctggtgatgcgtgtgaaagtgaaagatgccaagaaaaccactgaaatgcgtgctgcgctggtgaatgccgatcagacgttgagtgaaacctggagctaccagttacctgccaatgaataagacaactgagtacattgacgcaatgcccatcgccgcaagcgagaaagcggcattgccgaagactgatatccgcgccgttcatcaggcgctggatgccgaacaccgcacctgggcgcgggaggatgattccccgcaaggctcggtaaaggcgcgtctggaacaagcctggccagattcacttgctgatggacagttaattaaagacgacgaagggcgcgatcagctgaaggcgatgccagaagcaaaacgctcctcgatgtttcccgacccgtggcgtaccaacccggtaggccgtttctgggatcgcctgcgtggacgcgatgtcacgccgcgctatctggctcgtttgaccaaagaagagcaggagagcgagcaaaagtggcgtaccgtcggtaccatccgccgttacattctgttgatcctgacgctcgcgcaaactgtcgtcgcgacctggtatatgaagaccattcttccttatcagggttgggcgctgattaatcctatggatatggttggtcaggatttgtgggtttcctttatgcagcttctgccttatatgctgcaaaccggtatcctgatcctctttgcggtactgttctgttgggtgtccgccggattctggacggcgttaatgggcttcctgcaactgcttattggtcgcgataaatacagtatatctgcgtcaacagttggcgatgaaccattaaacccggagcatcgcacggcgttgatcatgcctatctgtaacgaagacgtgaaccgtgtttttgctggcctgcgtgcaacgtgggaatcagtaaaagccaccgggaatgccaaacactttgatgtctacattcttagtgacagttataacccggatatctgcgtcgcagagcaaaaagcctggatggagcttatcgctgaagtcggtggcgaaggtcagattttctatcgccgccgccgtcgccgcgtgaagcgtaaaagcggtaatatcgatgacttctgccgtcgctggggcagccagtacagctacatggtggtgctggatgctgactcggtaatgaccggtgattgtttgtgcgggctggtgcgcctgatggaagccaacccgaacgccgggatcattcagtcgtcgccgaaagcgtccggtatggatacgctgtatgcgcgctgtcagcagttcgcgacccgcgtgtatgggccactgtttacagccggtttgcacttctggcaacttggcgagtcgcactactggggacataacgcgattatccgcgtgaaaccgtttatcgagcactgcgcactggctccgctgccgggcgaaggttcctttgccggttcaatcctgtcacatgacttcgtggaagcggcgttgatgcgccgtgcaggttggggggtctggattgcttacgatctcccgggttcttatgaagaattgccgcctaacttgcttgatgagctaaaacgtgaccgccgatggtgccacggtaacctgatgaacttccgtctgttcctggtgaagggtatgcacccggttcaccgtgcggtgttcctgacgggcgtgatgtcttatctctccgctccgctgtggtttatgttcctcgcgctctctactgcattgcaggtagtgcatgcgttgaccgaaccgcaatacttcctgcaaccacggcagttgttcccagtgtggccgcagtggcgtcctgagctggcgattgcactttttgcttcgaccatggtgctgttgttcctgccgaagttattgagcattttgcttatctggtgcaaaggaacgaaagaatacggcggcttctggcgcgttacattatcgttgctgctggaagtgcttttttccgtgctgctggctccggtacgcatgctgttccatacggtcttcgttgtcagcgcgttccttggctgggaagtggtgtggaattcaccgcagcgtgatgatgactccacttcctggggtgaagcgttcaaacgccacggctcacagctgctgttagggttagtgtgggctgttgggatggcgtggctggatctgcgtttcctgttctggctggcaccgattgtcttctcgttgatcctgtcaccgtttgtttcggtgatttccagccgtgccaccgttggtctgcgcaccaaacgctggaaactgttcctgatcccggaagagtattcgccgccgcaggtgctggttgataccgatcggttccttgagatgaatcgtcaacgctcccttgatgatggctttatgcacgcagtgtttaacccgtcatttaacgctctggcaaccgcaatggcgaccgcgcgtcaccgcgccagtaaggtgctggaaatcgcccgtgaccgccacgttgaacaggcgctgaacgagacgccagagaagctgaatcgcgatcgtcgcctggtgctgctaagcgatccggtgacgatggcccgtctgcatttccgtgtctggaattccccggagagatattcttcatgggtgagttattacgaagggataaagctcaatccactggcattgcgtaaaccggatgcggcttcgcaataaaaacgtagttgcctgatgcgctacgcttatcaggcctacatcgttcctgcaatttattgattttgcaagactttgtgggtcggataaggcgttcacgccgcatccggcaaaaacaacgagccaataaaaataccggcgttatgccggtatttttttacgaaagaggtatcaaatgcgtttaattgtggtgagcatcatggtgaccttgctgagtggctgtggcagcattattagtcgcactataccggggcaggggcatggcaaccaatattatcccggtgtgcaatgggatgtgcgtgactccgcctggcgttatgtcacgatccttgatctgccattctctctggtttttgatactttactgctgccgatcgacattcatcatggcccgtatgagtgattaacgttcatcccactcatcagctgctgcgcgtccttcctcggtatccagcggtggctcaagctgaaattccccctcgtcccattcatgtaatgtattctcttcctgccactcctggcgtatctctatctcatcatagtcgccatcaaaaacactttgcgcggcttcaccgctaagcataggtaaacattcaccttcttccccttcgtcggcaaaaaactcaacttgccacatgatgtcgccgtcctgcaaaacgtatttttgggcattgaactgttgcacattcgcatcttcggcgtcgatgccggggttgtctgcaagaaattcttcgcgtgcagcgtcaatggcttcttcaagcgttgcgtacatggtcatcacgattctccctttgagttgatgaggtttcagggaaaaggatagctgattctccgcttttgcaagtatgaaaggcgaaaaatcagttcgatacctggggtattcgacgacgacgtagactgttccatgaatagactgcgttgaataacactacgccagcggtgacgagaaataccgctctgaaaccgtagttcgctgaaatcgctgctcccatcaatggtccggtaacgttgccaatatcacgaaacgattggttatagctgaagatacgcccggcgatctggttgctcgagttgtaaaccaacagtgtctgtacggcggggagtagtgcaccatcggcggcaccgagcaaaaaacgtaaaatcccaagttgcaatggcgtctgaacgtaagacattgggatcaacagcagtacagaaaagatcagcgctgtaatcaggatcttttcgggtccgattcgatcgccaagtttgccgagtcgtggtgcacttagcagagccgccacgcctggcaccgaggcgatcatgccactgataaaggcgacgttactgacgttacccgccagttcgcggacatacagcgtcagaatgggggcaattgagcccgtcgccacctggatgattaacgtagtgacaaacaggctgagtaccagtttcgggtttttaagtgatgtcaccacttcccgcatgtgcagcatctcttttttgctgaccggctggaatttttctctgatgcaaaacagggtgacgaaaaagcagagtatgagcacactggcggtaataaagaataccggacgtaagccgtagctatcggcgagcaggccgccagccattgggccgagcaacgcaccactaacgccgcctgtggagagcgtacccagcgcccagccgcttttattacgcggtacttgtgtggcgataagagcattagcgttggggacaaatccgccaagtaacccaagaagcgcccgcaggatcaaaaactgccagatattttgtgccagccccatcaacaccatcacgatgcccatttattattaattgagggcagagcgtaatagcatgagttttcggcctttacggtcggcgagtccaccccaaaacggtgaggcgatggccgaaaataaaaatgtaatgctgaagacaataccggaccacatattcagggcggagtgaccggtaacgccaagctgctcaacgtagaggggtaagaagggcattaccagactgaaggcggcaccggtaagaaaacagcctagccaggcgacgatcaggtttcgtttccagtttataggggtgtcattttcacagggtgacatagcaatccgctgttggtgcgccaggcgcggtgaacataagaagaaaagataagcacactaattatgcgcccgacttccagggggcgcaatccagagagcttttatcgctaaatcagggggatttgctgtggtaatgccggatgccattctgaagcatccggcatgggagatttaatagcgtgaaggaacgccttccgggcgtgttttaaagcgacggtgtaaccacatatactgctctggtgccatcatgatgcatttttcgaccactttgttcatccacgcggcggtagtttcggcatcatccagtggcggagaacactctggcggcagcataatcaattgataccctttgccatctggcttacggcgtggaacgaagggcaccagacatgcgccggacatccgtgccagcatccaggttccggtcgtggtcgcagcctgctcaacggcaaacaacgggacgaaaacgcttgagcgcgggccgtaatcatgatccggtgcgtaccagaccacttcgccttttttcagggctttaatcatgccttttaaatctttgcggtcgagcatcgatttatttgagcgcaaacggccccaggtttgtagccagtcaatcagtggattatcgttcgggcgataaacgccaatacccggttcctgcataccaaactgccgcgcacccagctccagtgtcagaaaatggatgccaactaacaggatgccgcgtttttgcgcctgcacgtcacgaatgtgttccatgccgatcacttccgtccagcgggcgattcggcggtccggccagaaccacgccatgccggtttccatcaggcccatgccaacggattcgaaattcttcaccaccattttacggcgttcttgttcgctcatttccgggaagcacagttccaggttgcgatgcacaatttttgcgcgtcgtttcataaaacgtaacgccagttttcctaatccacaaccgaggcggtagataaccgggtagggcaattgcacgactaaccaaagtacgccaatacccaaccaggttaaccaataacgcggatgaagcagtgcggtggagaacttgggtagattcgtcatatcaatcctgtttttcaacctattcgggcaattgtatgtattgtcgcattttttcgcccgcaaccaaaatttgtggctgaagactgggcgaaattgccgcgcttgtaaataacaaataatttttaatgcgcaaatgtagcgtaaaatgtgtggatgttaattatcgataattgctatatcatgccgcggatttttactttcccatctcgcaggaaccgtacaccatgccagtgttacacaaccgcatttccaacgacgcgctaaaagccaaaatgttggctgagagcgaaccgcgaaccaccatttcgttttacaagtatttccacatcgccgatcctaaggcgacccgtgacgctttatatcagctgtttaccgcgctgaatgtttttgggcgagtgtatctggcgcatgagggcattaacgcgcaaatcagcgtacctgcgagcaatgttgaaacatttcgcgcgcagctctatgccttcgacccggctttagagggtttacgcctgaatatcgcgttggatgatgacgggaaatccttctgggtactgcgcatgaaggtacgcgatcgcattgttgccgacggtattgacgatcctcactttgatgccagcaatgttggtgagtatctgcaagcggcggaagtgaacgccatgcttgacgatcccgatgcactatttatcgacatgcgtaaccactatgagtatgaagtggggcactttgaaaacgcgctcgaaattccggcagataccttccgtgagcagctgccaaaagcagtcgagatgatgcaggcacataaagataaaaaaatcgtcatgtactgcaccggcggcattcgttgtgaaaaggccagtgcctggatgaaacataacggattcaacaaagtctggcatatcgagggcggaattattgaatacgcccgtaaggcgcgcgagcagggcttgccggtgcgttttattggcaaaaattttgtttttgacgagcggatgggcgaacgtatatcggatgagattatcgcgcattgccaccagtgcggcgcgccgtgcgacagccataccaactgtaaaaatgatggctgccacctgctgtttattcagtgtccagtatgcgcggaaaaatacaaaggttgttgtagtgagatttgctgcgaagaaagcgcgttaccgccagaagaacagcgacgccgtcgggcaggacgtgaaaatggcaataagatctttaataagtctcgtggacgtctgaatacaacactgtgcattcctgatccaacagaataaatatcattgccggatgcgtgccatccggcaacatttcacgcttacttctgctgtacgccttccactgaaataatcagatccacttcctgagaagctggacctaaatctgtcttgatattgaagtccttgagcttaattttgccttcggcctcgaagcctgcacgtttaccaccccatgggtcgtcgccctgaccaattaatttcgcttccagcgtgacgggtttggttacgccattcagcgtcagatcgccggtaatatccagttcgtcaccgtctttcttcacgctggtggaggtgaatgttgcctgtggatattttgcggtattgaggaaatctgcactgcgaagatgtttatcgcgttcggcgtgattagtatcgacgctggtggtgttaattgtcacattcactttatcggcagccggatttttttcgtcaaaggtaaaagtaccgtcgaaatctttaaaggtgccgtataaccagctatagccaaggtgctggatgcggaaattaacaaaggcgtgctgaccttctttgtcaattttgtaatcggcggcaaccgctgaaccggcagagaacatcagggacgcgaaggttaaaccaagcaggctttttttcattttttatactccatagtcagatgacgactttcccagcatgcgcttcagagtgtcgtctttatcgatgaaatgatgcttcagggccataaatccgtgcataacggacagtactacgacgctccacgcgagccaaaaatgcagggcaccggcaaagtctgcctgtgcgccagcgtcggcaagggtcgcggggacgtcaaaccagccaaaaacgctgatcggtttaccatcggcagttgagatcagatagccgctgatgccgatggcgaaaagcaataggtacaatgcgagatgtccagctcttgcggcaagacgagtcatgggcgaataactcggcagcggacccggcggtggagatatgacacgccacagaacgcgaataaccagccccatcattaacaaaataccgatgcttttatgcagttcgggtgctttgtgataccagccatcgtaataactgagcgtgaccatccacagacctaaagcaaacatgccgtagacaataattgcgcttagccaatggaaggccgcagatataacaccatagcgttcaggggtatttgtgaatgacataagtgcatccaaaacgaatttgcgagagaaagaaaatggcgtgtcggagaatgaattgcaacacaaaaataacaaattgaatgatatttatttttatttcaataattttgaattaataatgaaagaatcttcataagtttagtgggttcagcatcagagatgtctggtgagtgctgtagaagcaggaataatctcattcaatttttcacgctaaatgaaagggagattaaatatttgtcagtttatgtcagtgcggaaaactaaaaataaaacacatagatcagatccataattgccaacaatccccagagaaaaagataaagcatcagatgctcgcgaatattattgatgagatagtgcaacagccgacgcattaaatactcctgtaaaaacggcctcattctggaggccgtaatgatgattattggaagcgggaaagcctgaatggcgtcaaatcaaaatcgctttttttgtcttgcgcaaaatcggcagctatttcccctaaaactgacgcaaatttaaaaccgtgcccactcaggccggtaatgagcagtgtattatcgtggccgggtagggtatcgataataaaatcttcgtcaggcgaattatcataggtgcaggcagcgccgtacaggcagcaaccgatacccggcaatacattgcgcaagaacgggaaggcttctgacccatcactggccacttccgcaaacggaacacgttcatccgctgaatggataacctggcctccgttatgtttgccaatcttcaacgcgtcgttttctgccggaaaaccataatattgatcgccattgggcagttcaccggtaaacgccgggaatttattcttcacgctatagcggccatcggcctgataccaggcaaatactttgcgtacgggctggacaggcagctccgggagcaggtcttttacccatgttcccgcgcagacaatcgcttttttcgcctgatactcaccgtcagccgtttcaatagttacgccatcatcgtcatgacgaattgcggtgaccgggcagttgaacagttgcgcacagcccgcttccttcgccagttggatccaggttttaatcgccagttcgctgcgcaaaaaaccggaatcagtttcaaataagccgatgtagttgtccgggacgcgtatttccggccagcgggccataatcccttgcgcatcgagcttttcaacgttgagttgccattgttcggcgctgtgggcgacgttggcgagaaatgtggaatcagccgggccaaggttaatgacgccagagcgtacaaaaatgggatcttcttcgttgtggcgggagagttcatcccacagcgtttgcgcgcggaggaccagcgggacatacttttcgccttcaccataagcatggcgaattaatcgcgtatcgccgtggtggctgccgtgttgatgcggtggcatatgggcgtcggtcattagcacgtttaaaccggcgcgggttgcataatacccggcggcagcgcctacggaaccgctgccaataatgatgagatcgtatttcatttttttctctctgctctcatggtttaagcagagtaattaactgaatgcagatatacaacccagaaatggtaaaggcaccggtgaggtgccttttgggtggatggtcatgtcatgttaatgacgccgatactcgtttacctggaaatcaccggattcaattttggcgattcctgcttctaatatcgaaataaattgtctggcaacatcagtggttaaccagagcgtctgaccaacttcagtcccttcctgctcggacttatttggggtctggtagtgcaaacgcaacatcagcgcatcatagctatcaacggtgctgatgtcccaccctacgagcggatgagtctgaatgacttcattatttttttccatcatggccccctaattcgtgttactagacaacgttattcgaggttcaatgcgtttttatctgaagcaacttcagtataccaataagtaagggtattcaccgaatttttaaagggggaaacagataaatttctgcttttaagatttatatgaacaataaaacagcatgtcattcatatttttttagcatattgtgcaattattttgaggaagtgtagaaattttgtactcaaaattcgtaagtaaaataaaaaagccggggcgacccggcaaaaaaaatcactgcatattattcgctgacaaaccagtcatcggcgctttcccacgtttcctggagaatttcactaatgcgctgtttatcttcttttgtcgcgccaataaccgataaattattcgctgcggcataacgtaccgatacgtggccttcattatcaggaaacgcatactgaatacggcgggaaagttcgccagccagggcgtcaatagccccagctggcaatggagaagttttcgctatggtgacttcaattcgcataatagccccctgttgaatatactggttatttatacaggtaaaataacctaatgacaacaggaagctacgatttttattgtttaacggaccagcgtaccgtttccccggcgaggaatggcaccagcgtgtcatcagtcagtgcgatgctttcagcaacctgttgctcttcacgtaccagttcgatgaatgtgtcgttgaccggcaacccatagaactgcgggccgtttacagaacagaatgcttcaaagtgctgcaaagcattcatttcttcaaagacggtagcgtaactgcccagcgcggttggggcgttgaagcagcccgcgcagccgcaactgctctctttgcgatgacgtgcatgtggcgcagaatccgtaccgaggaatactcgattaaaaccgctggcgaccagttcacgcaatgcctgttggtgaatattacgtttgaggatgggtagacaatacaggtgcggacgcacgcctccaaccagcatatggttgcggttaaacatcagatgctgcggagtgatggtggcagccagccgttcatttccgtcacggacatagtcggcagcatctttggtggtgatgtgctcaaaaacgactttcagcgcagtcaggcgctggcgcagaggttccatcacgctttctataaagcgcgcttcacgatcaaaaatgtcgatatctgcatgtgtcacttcaccatgcaccagtagcggcataccgattttttccatgcgctcaagtaccggcatgattgcgtcaattgacgtcacgccgtggctggagttagtggttgcgtttgccgggtaaagttttgcagcggtgaacacgccttcgttaaatccgcgctccagctcattaggatccagcgaatctgttaaataacaggtcatcaatggggtgaaatcgtgcccggcaggtacggcgtcaagaatacgctggcgatacgccacggcagcctcaacggtggtcacgggcggagccagattgggcattacgatagcccgtccataaatttcgctggtatatggcacgacagtttttaacatgtcgccatcgcggaggtgaaggtgccagtcgtctgggcggcggatctttaatacctgggatggtgcagtcattaatctctatgctccggctgaagggatgtttttgccggacacaaaggataagcggaaacgttttcctttgcacgaaaaataaagggcgcgaatgcgccctcgtgattaatcagtaaatggaatgacaatttcgcctggcttcacttcaatgcctttcgccagttttttcgccattgcttcgccctggctgccatcttcgcgcaggacgtaagcaggttgctggttaaagtaattgcgtaatgcctggttcaaatagggaagcaacgtttgcatcaccgtttgcattttttccggttgtaccgtcgcatcgaccacttccatctctttcaggaagatcgcacctttttctttatcaaacacgggcagcgctttcagcttcagtttcatggtcgctttctgactaccgaacagggagttcatgtccagattggcgtctccggttagggtaaccttattcggctcttcgcgaccaatttggctggtcaggtttgtcagaacaatatgggcgtcagccacgccgggtaaaccgatatcttttgagaaattattatgtttcgcaagcgactggttaatttcttgttcggtgatggtgtattgggtgagttgattacagccaacgagcaggccactgacgatcaatgcagcggcaaataaaaacttgttcatggtagtcctcgacatgaaatctgcgtcaatatcctgacacaacgcagcatgtgtcaccagcgataaactcgccagcagaaaaaactgaaaacggcggcaacccgcgaatacaggctgccgcggcgggtcaggattaaatcgccattgatgataacaaattgatttgtgtctgtttcgccatattatcgcggtaatcagcaacgcggcttggccagttaattccggctaccagcgtcagattacgcagtagcgggaatagctgaatatcatcttccgaaagttcgccattcacggcgttcggtttgacgatcagtttgtccagcgcacgtaaatcatcgctgatattcttaatcagaccgtcagagtgggccagcaggtcggcaaaattacccgcgctggcctctttcttgtcgacgaaatatttgcgcgcggcgggagtagaaaactcatcaaatgccgatttggcaaaacgcggcaacagcagtttgttggcgtagccattgaccttgcgcagccactcttcaatggcaggggaacgtttgccggtcagtaacggtttgccgtcgagtttatcgacatagtgaacgatgtccatgctttctggcatatagcggctgtcatctttttgcagaatgggaacctgtttttgaccgaccatccgggtgggtgtttctgcgtcgtcgttgagcagaacatgtaattcgacggggatatttttcaggccgaaaatcatgcgggctttgaggcagtaagggcagtgatcgtaaatgtatagcttcacgtgactcctccatttggctgtcagttcactttcagtatgaaggagtcaggggggagtatcaaatcaggcgtcgcgttcaagcaaacgacgcgcggcgcgtttctggctaaactgccaacccagcgcaaggaaagtgaagatgccaataatgcccagcatcatccacggaagctctggctggtgcgccgatttgcccaggtcaaacagccagccgccaccgatataaccaatagcgccgccaatcgccagacccagacggctaaaccccatatagctgccgcgagctcttgcgtccgccagcgaagcacttaaggtttcacgcgcaggctcggcaatgatcgacccgatataaaacagacaaatcagggtgaaaagttgttgcaggccgctgaccatgcccaccggcatcatgcttaatgacattatcaacagcccagccatcaaccggtgttccagacgaaaatgcttttcactccagcgggcgatagggtagagcaacgttaacgacagacacgcttcaatggcatacatccatttaacggcagagggcgcgccagccacgtcgttgaccataattggcagcatcagcatcacttgtacagccagcatgtagtaacccgccagcgtcagaacataggtgacaaaacgcttgtcacgcatcacgcgggtcatgccttcgcgaacgggcgtgcgtacggtggagagtttccatgctggtaacaaccacgcattgaacgccgcacatagcacaaatagaactgcccctgtggcgcagaccaggcgaaagtcgtattgcaacagccagctccccaacaatgcgccaatgaccgcaccggcactgtcctgcatcatcaacagcgagaaaaaacgaccacgctgctgtggacggattaatttcaccaccagcgccgaacgcggcggatcaaacaacgtgccaccgagtcccgagagcaggcatgaaaaccacaatagccacggttcgtgggcgatacccattgtggcgaatccggcggcgcgcatcagcataccggtaacaatcatcggtttggcaccaaagcggtcggcaattgcaccgccgaaaatacccagaccttgctgaataaattggcgtagaccgagagcaataccgaccatgacttattattaattggcccagcccatttgatcaacgaagcggatagagatcagcgggaagacaacaaagaaccccagcacgaccagcatattatcgatgagcaggaaatatttacccaggttcctcgcctgcgacacgcgggacatttcccctcccgggaaataaaagatgagcactttctattctgcattgccgctaagacttttcccatcacttcggggacaatatttttttatcaaaacgtcgctttgatagagagtttttatcaaatatgtgaataatgcagaaaatggcattttggacttttcacagggtctggttgcgcaggtatagtaatacttacagcgtattaaagacgttacgggaaggagtaggtatagaatgtttggctatcgcagtaacgtgccaaaagtgcgcttaaccacagaccgactggtcgtgcgtctggtgcatgatcgtgatgcctggcgtcttgcggattattacgcagagaatcgccatttcctcaagccctgggagccagtgcgcgacgaaagccactgttatccatcaggctggcaggccaggctggggatgattaacgaatttcataaacaaggttcagctttctactttggcttattcgacccggacgaaaaagagattattggcgttgccaatttttccaatgttgttcgtggctcttttcatgcctgctatctcggttattcgattgggcaaaaatggcagggcaaaggactcatgtttgaagccctgaccgcagccattcgttatatgcagcgcacccaacatattcatcgcattatggctaattatatgccgcacaataaacgcagcggtgatttactggcgcgactgggttttgaaaaagaaggctatgcgaaagactatctgttgattgatggacaatggcgcgatcacgtactgacggcattaactaccccagactggacgcccggccgctaaggagaatctcatgaaatatcaacttactgcccttgaagctcgcgtgattggttgcttgctggaaaagcaggtgaccacgccggagcaatacccgctctcagtcaatggtgtagtcacggcctgtaatcagaaaacgaaccgtgaaccggtcatgaatctgagtgaatccgaagtgcaggaacagctggataatctggtcaaacgtcattatctacgcacagtgagcggttttggtaatcgggtcaccaaatatgagcaacgtttttgtaattcagaatttggcgatctgaaactgagcgcagcggaagtggcgttaatcaccacgttgttattgcgtggtgcccagacgccaggtgaactgcgcagccgcgccgcgcgaatgtatgaattcagcgatatggcggaagtggagtcgacgctggaacaactggcaaatcgcgaagatggtccttttgtggtgcgtctggcccgcgaaccgggtaaacgcgaaaaccgctacatgcatcttttcagtggtgaggttgaagatcagccggcggtgacggatatgtcgaacgcggttgacggtgatttacaggcccgcgtcgaagccctggaaatcgaagtggcagaactgaaacagcgtcttgattcgttgctggcccatctgggagattaaagtgaaaaaattacgtatcggcgtagtgggattaggtggcattgcgcaaaaagcgtggttaccggtgctggcggcagcgtctgactggacgttacaaggagcctggtcgcctacgcgcgcgaaagccctgccaatttgtgaaagctggcgcattccttatgccgattcgttatccagccttgccgccagttgcgatgcggtttttgtgcattccagcaccgccagccactttgacgtggtcagtacgttactcaatgcgggggtacatgtctgtgtcgataaaccgctggcagaaaatctgcgcgatgctgaacggctggtggaactggcggcgcggaaaaaactgacgttgatggtcggttttaaccgtcgtttcgcaccactctacggtgagttaaaaacgcaactcgccaccgcagcctcgctaagaatggataaacatcgtagcaatagcgtcgggccacacgatctttatttcacgttgctggatgattatctgcatgtggtggataccgcgctgtggttgtcgggcggcaaagcctctctggatggcggtacgctactgactaacgacgctggcgaaatgctgtttgccgagcaccatttttcggctggtcctttgcagatcaccacctgtatgcatcgccgtgccggaagtcagcgtgaaaccgtgcaggccgtgactgacggtgcgctcatcgacattacggatatgcgcgaatggcgtgaggagcgcgggcagggcgtagtgcataaaccgattcctggttggcagagtacgcttgagcaacgtgggtttgtcggctgtgcgcggcacttcattgaatgtgtgcaaaaccagacagttccgcaaaccgccggcgaacaggccgtgctggcgcaacgtatcgttgacaagatctggcgcgatgcgatgagtgaataaaccctgtaacatctggcggtagcaattcaccataatccaggtagactattcgcctctttcagcgcctgccttgcaggcgttttgcccgtgggtctggattagaacaccgatgaatttattaaaatcgctggccgccgtcagctcgatgaccatgttttcgcgtgtgcttggcttcgcacgagacgcaattgtcgccagaatctttggcgcagggatggcaaccgacgcctttttcgtcgcttttaaacttcctaacttgttacgccgtatctttgccgaaggggcattttcccaggcatttgtaccgattctggcggaatataaaagtaagcagggtgaagacgccacgcgggtctttgtctcttatgtttctggcctgctgacacttgcgctggcggttgtgacggtcgctggcatgctcgccgcaccgtgggtgatcatggtgaccgcgccaggcttcgctgacacagctgacaaatttgccctgaccagccagctactaaagattacctttccctatatcttgctgatctccctggcgtcgctggtgggagcgattctgaatacgtggaaccgcttctcgattccggcgtttgctccaacactgcttaacatcagcatgattggtttcgcgctgtttgccgcaccgtactttaacccaccggtgctggcgctggcgtgggctgttacggtcggcggcgtcctgcagctggtgtatcagctaccgcacctgaagaagatcggcatgctggtcctgccgcgcattaacttccacgatgccggagcaatgcgcgtggtgaaacagatgggaccggcgatccttggcgtctctgtgagccagatctccttaatcatcaacaccatttttgcctcgtttcttgcttccggttcggtgtcttggatgtattacgccgaccgcttaatggagtttccgtccggtgtgctgggcgtggcgcttggcaccattttgctgccgtcgctgtcgaaaagttttgccagtggcaatcatgatgaatacaaccgtttgatggactgggggttgcgtctttgtttcctgttggcgctgccgagtgcggttgcgttgggcattctttccggtccgttgaccgtttcgctgttccagtacggtaaatttaccgcgtttgatgcgctgatgacccagcgggcgttaattgcctactcggtgggtttgattggcctgattgtagtgaaagtgttggctcctggcttttattcccgccaggacattaaaacgccagtgaaaattgccatcgttacgctgattttaacgcaattgatgaacctggcgtttattggtccgttgaaacatgccgggctgtcactttctattggtctggcggcgtgtctgaatgcttcgctgctttactggcagttgcgtaagcagaaaatctttaccccgcaacccggctggatggcgtttctgttgcgtctggtggtggcggtactggtgatgtctggcgtgcttttaggtatgttacatatcatgccggagtggtcattgggtaccatgccctggcgtttactgcgtttaatggcggtcgtgctggcggggattgccgcgtacttcgctgcactggcggtactgggcttcaaagttaaagaatttgcccgccggacggtgtaacaatgcattccggcctgcagtgcaggccggagataatcttcagatcgaaatctttttaccgccgcgatgggttgttgaggtctgaccgttcgccccatatagcgtcggttcctgatgcggtttcaacatttccagcgcctgttgattgcgctcaatctgtccttccagtaaccagccgttatgttgattcatttggcgtagttgctgcgttttcacagtaatttcctgccagcgttgactaatatcaacgctatttgctgtattgggttctttcctgcgtaactgttcgaggtaatccagcgtcgccagcagtgagcttttttgttctgtaatccattgcaactggctgccgttgatctgccccatagagagatgttgctgctcttgatccattaccgttttgagatcgttaagcacagcggacatctggtcgaggatctctgcaagacgtgtcatacgatcagttactctgcaagtcttgctgcgcttcgttgatcagcgcatcggcaattttgccggtgtccatttttagttcaccgttacgaatcgccagttttaacgcttcgacacgttcaagattgatatcactgctgccgggttgcatcagttttgcttgcgcgtcgcttaacgtcacactggtgctggtggaggcggttgtttttgccgcccggctgttcgttaccggcgcgtcagtggtttcgcgcggttgaacggtgcttacaggcttcagaggcgaagtgcgatcaatactcatggtttattcctcattgagggcgcttttatcatgtgttgcttatttatcggcaagggacgggtaatctttaacagcttacaggtttataagaatattcccatctgcatcaacaacgccgctgactacctgtcccgataccatgcgcacccgcgcattctgtgcgacggctgcattgttcagcgcctgaccttctgcgttggcgctaaacccatcaccgctggcgatcacattgacgcgttgtcccgcttttacccgccatgcctggcgaaactgggttaactggataggttgatcgggtgatagatcgcgcaggctaatggcatcaacaagttgattgatatccagcaccgtacgcggtggcagggtatccagccgtccgcgtttcagtttgacattgccagcttccagctttcctccccgcgcaatgggcatcgcggcaaccacataatttcctgtggcctgtacattaacctgtaaatatcgtttgtcgttaccgcagcgtgccaacacattcacattgccccacaggcgggaattattgctcatcgaaagcaatggctgctcgcatggcggtagtagattgggcgctgtacgaatagaaacacgaacctcatcacttacccccgcgagttgggcgctaaaaaagttgtgcaattgcgatgtgagattgctcgccgtacttaacggactgaacagtatcgcgatgatcgccacgctacgttttattatcagcattttcgcccccagccatttctacaacgtgaattgtacctgtccgcaatgaccatcaacggcataaatagcgacccattttgcgtttattccgccgataacgcgcgcgtaaaggcatttaagctgatggcagaattttgatacctgcggaggagatatgctcgataagctcgacgccgccttacgttttcaacaagaggcgctcaatctgcgcgcccagcgtcaggaagtgctggcagcaaacatcgccaatgccgatacccctggttatcaggcgcgcgatatcgattttgccagtgaacttaaaaaagtcatgcaacgtggacgggatgcaaccagtgtggttgcactgacgatgacctcaacgcaacacattccggcgcaggcgctgacgcctcctaccgcagaactgcaataccgtattccggaccagccttcgcttgacggtaataccgtcgatatggatcgcgaacgcacccagtttgccgataacagcctgcaataccagatgagccttagcgcgttgagcgggcaaatcaaaggcatgatgaacgttttacagagcggaaattaacggatggcactgctgaatatttttgatatcgccgggtcggcgttaactgcccagtcccagcgcctgaacgtggcggccagtaatctggcgaatgctgatagcgtgaccggtcccgatggacagccatatcgggcaaaacaggtggtattccaggttaacgctgcaccaggtgctgcgacaggcggcgtaaaggttgccgatgttatagaaagtcaggccccggacaaactggtttatgaaccgggtaatccgctggcagatgcaaagggctacgtaaaaatgccgaacgttgatgttgtcggagagatggttaacaccatgtcggcgtcacgcagctatcaggccaatgttgaagtgctcaacacggtgaaaagcatgatgctgaaaacccttacgctcggtcaataaaggagaaagctatgtccattgcggtaaccaccaccgatccgacaaataccggcgtcagtaccaccagcagtagttcgctcacgggcagcaacgccgcagatttacaaagcagttttctgactttgctggtggcgcagctgaaaaaccaggacccgaccaatccaatggaaaacaacgagctgacgtcgcaattggcacaaatcagcacggtcagcgggattgaaaaactcaataccacgctcggatctatttccggacagattgataacagccagtcgttacaggccagtaacctgatcggtcacggcgtgatgatccccggcaccactgttcttgcgggaaccggcagtgaagaaggggctgtgaccacgaccacgccgtttggtgttgagctgcaacaggcggcagacaaagttacggccaccatcaccgataaaaatggcgcggttgtgcgcaccattgatattggtgaactgaccgccggagttcacagtttcacctgggacggtacgttgactgatggcagcactgcgccgaacggttcttacaatgtagcgattagcgccagtaacggtggtacacaactggttgcccagccgctgcagtttgctctggtgcagggtgtgatccgcggcaacagcggtaatacgctggatctcggcacttacggcaccaccaccctcgacgaagtacggcagataatttaagccttcacatttcaggagtcagtcatggccttttctcaagcggttagcggattaaacgctgccgccaccaacctcgatgttattggcaacaatatcgccaactccgccacctacggctttaaatcaggcacggcctcttttgccgatatgtttgccggttcgaaagtgggactgggggtaaaagttgccggtatcactcaggactttaccgatggcacgaccaccaacaccgggcgaggtctggacgttgctatcagccagaacggttttttccgtctggtagacagcaacggttcggtgttctacagccgtaacggacaatttaagctggatgaaaaccgtaacctggtgaatatgcaaggtttacagctgacgggttacccggcaaccggtacgccgccgactattcagcaaggggcgaatccgaccaatatttcgatcccgaataccctgatggcagcgaaaactaccaccacggcatcgatgcagatcaacctgaattccagtgatccgcttcctactgttacgccattcagcgccagcaatgcggatagctataacaaaaaaggttcggtgactgttttcgacagtcagggtaatgctcatgacatgagcgtctactttgtgaagaccggggataataactggcaggtctacacccaggatagcagtgatccaaacagcattgcgaagacagcgacaacactggaatttaatgctaatggcacattagtggatggtgcgatggcgaataatatcgcaaccggcgcaattaacggtgcagaacccgccacgtttagtctgagcttcctcaactccatgcagcaaaataccggcgctaacaatattgtggcaaccacccagaacggctacaaaccgggcgatctggtgagttatcaaatcaatgatgacggtacggttgtcggcaactattccaacgaacaaacccaactgctggggcagattgtactggcgaactttgccaacaacgaaggtctggcatccgaaggcgacaacgtctggtctgcgacgcaatcttctggcgtggcgctgttggggacagccgggacgggaaactttggcaccctgaccaacggtgcgctggaagcgtccaacgtcgatctcagtaaagaactggtcaatatgatcgttgcccagcgtaactatcagtctaacgcccagaccatcaaaacccaggaccagatcctcaacacgctggttaacttacgctaatcgctgacgggatagctcaatggatcacgcaatttataccgcgatgggagcagccagccagacactgaatcaacaggcggtaaccgccagtaatctggccaatgcctcaacgcccggttttcgcgcgcagttgaatgctttacgcgcggtgccagtggaagggctttctctgcccacgcgcacgttggtcacggcgtcaacgccgggcgcagatatgacgcccggcaaaatggattacacctcgcgcccgctggacgtcgcgttgcagcaggatggctggctggccgtgcagaccgctgacggcagcgaagggtatacgcgtaatggcagcattcaggttgatcccaccgggcaactgacaattcaggggcatccggtgataggcgaggctgggccaattgctgtgccggaaggggcggaaatcactattgctgccgatggcacaatctcggcgctcaatccgggcgatccggcaaatacggttgcgccagtagggcgtcttaaactggtgaaagccacgggcagcgaagtgcagcgcggtgacgacggcatttttcgtttaagcgcagaaacccaggccacgcgtgggccggtactgcaggcagatccaaccttgcgtgtgatgtcgggggttctggaaggcagtaacgtcaatgccgttgcggcaatgagcgacatgattgccagcgcgcggcgttttgaaatgcagatgaaggtgatcagcagcgtcgatgataacgcaggccgtgccaaccaactgctgtcgatgagttaattgaaaggatacatgacaagtataagttgcccgatgcgcaagtttatcgggtctatgggggcaatcgcaatttatcgattttgcgagcacttgtaggccggataaggcgtttacgccgcatccggcaagaagacatatgcactttgtcactaatccactacaggacattttatgatcagttcattatggatcgccaaaacgggccttgacgcccagcaaaccaatatggacgtcattgccaacaacctggcaaacgtcagtactaacggttttaagcgtcagcgcgcggtgtttgaagatctgctttatcaaaccattcgccagccgggggcacagtcttccgaacaaaccaccttaccctccggattacaaatcggcacgggggtacgcccggtcgccactgaacgcttacacagccagggaaacctgtcgcagaccaacaacagcaaagatgtcgcgattaaagggcagggctttttccaggtgatgttgccagatggttcatcagcctatacccgtgacggctctttccaggtggatcagaacgggcagctggtgacggctggtggttttcaggtgcagccagcgatcaccattccggcgaatgcgttaagtatcaccatcggtcgtgatggcgtggtcagcgtaacccaacaaggccaggcagctccggttcaggttgggcagctcaatctcaccacctttatgaatgacaccgggctggagagcattggcgaaaacctctacaccgaaacgcaatcctctggtgcaccgaacgaaagcacgccgggcctgaacggcgcgggactgctgtatcaagggtatgttgaaacgtctaacgtcaacgtggcggaagaactggtcaatatgattcaggtgcaacgcgcttacgaaatcaacagtaaagcggtgtccaccaccgatcagatgctgcaaaaactgacgcaactctaaggcttaaccggtggcaggttcaccggtttactgatttttgaagatgatagccatgcaaaaaaacgctgcgcatacttatgccatttccagcttgttggtgctttcactaaccggctgcgcctggataccctccacgccgctggtgcagggggcgaccagtgcacaaccggttcccggtccgacgcccgtcgccaacggttctattttccagtctgctcagccgattaactatggctatcaaccgctgtttgaagatcgtcgaccacgcaatattggcgatacgctgaccatcgtgttgcaggagaacgtcagcgccagcaaaagctcctctgcgaatgccagccgtgacggtaaaactaattttggctttgatactgtgccgcgctatttgcaggggctgtttggtaacgctcgtgccgatgtcgaagcctccggtggtaacacgttcaacggaaagggcggggccaatgccagcaatacctttagcggcacgttgacggtgacggttgaccaggtactggtcaacggcaacctgcatgtggtgggtgaaaaacagattgccattaatcagggtaccgaatttattcgcttctctggcgtggttaatccacgcactatcagcggcagcaataccgtaccgtctactcaggtggcggatgcgcgcattgaatacgtaggcaatggctacattaacgaagcgcaaaatatgggctggttgcagcgtttcttccttaacctgtcgccaatgtaagtgaggctgtggtgattaaatttctctctgcattaattcttctactggtcacgacggcggctcaggctgagcgtattcgcgatctcaccagtgttcagggggtaaggcaaaactcactgattggctatggtctggtggtggggctggatggcaccggtgaccagacaacccagacgccgtttaccacacaaacgcttaataacatgctctcacagctgggaattaccgttccgacgggcaccaatatgcagctaaaaaacgtcgctgcggtaatggtgacagcgtcacttcctccgtttggacgtcaggggcaaaccatcgatgtggtggtttcttccatgggaaatgccaaaagcttgcgtggaggtacgttgttgatgacaccgcttaagggcgttgacagtcaggtgtatgcgctggcgcagggcaatattctggttggcggcgcaggagcctccgctggcggtagcagtgttcaggttaaccaactgaacggtggacggatcaccaatggtgcggttattgaacgtgaattgcccagccagtttggcgtcgggaatacccttaatttgcaacttaacgacgaagatttcagcatggcgcagcaaatcgctgacaccatcaaccgcgtgcgtggatatggcagcgccaccgcgttagatgcgcggactattcaggtgcgcgtaccgagtggcaacagttcccaggtccgcttccttgccgatattcagaatatgcaggttaatgtcaccccgcaggacgctaaagtagtgattaactcgcgcaccggttcggtggtgatgaatcgcgaagtgaccctcgacagctgcgcggtagcgcaggggaatctctcagtaacagttaatcgtcaggccaatgtcagccagccagatacaccgtttggtggtggacagactgtggttactccacaaacgcagatcgatttacgccagagcggcggttcgctgcaaagcgtacgttccagcgccagcctcaataacgtggtgcgcgcgctcaatgcgctgggcgctacgccgatggatctgatgtccatactgcaatcaatgcaaagtgcgggatgtctgcgggcaaaactggaaatcatctgatgatcagcgacagcaaactactggcaagtgcggcctgggatgcgcaatcactcaacgaactaaaggcgaaagcgggcgaagatccggcggcaaatatccgtccggtggcccgtcaggtggaagggatgttcgtgcagatgatgttgaaaagcatgcgcgacgctttaccaaaagatggcctgttcagcagcgagcacactcgcctgtataccagtatgtatgaccagcagattgcccaacagatgacggcgggcaaaggtctggggcttgcagagatgatggttaaacagatgacgccagaacaaccattgccagaggagtccacgccagcagcaccgatgaaattcccgctcgaaactgtggtgcgttatcaaaatcaggcgctttcgcagctggtgcaaaaggccgtgccacgtaactacgatgattcgctgccgggtgacagtaaagcattcctcgcgcaactctcgctgcccgcccaactggcaagccagcaaagcggtgtgccacatcatttgatcctcgctcaggcggcactggaatctggttgggggcaacggcaaatccgccgcgaaaacggcgagccgagctataacctgtttggtgtcaaagcctctggcaactggaaagggccagttactgaaatcaccacgactgaatatgaaaacggcgaagcgaagaaagtaaaagcgaagtttcgcgtctacagctcgtatctggaagccttgtcggattacgttgggctgttaacgcgtaacccgcgctacgccgccgtgacgaccgccgcgagtgcggaacagggggcgcaggccctacaggacgcgggctatgccaccgatcctcactatgcccgcaaactcaccaacatgattcagcagatgaaatcgataagcgacaaggtgagcaaaacctacagtatgaacattgataatctgttctgaataactcaagtccggcgggtcgctgccgataatactctgtaattgaaggcttataaggaacctccatgtccagcttgattaataacgccatgagcggactgaacgcggcccaggcggcgttaaatacggcaagtaataatatctccagctataacgttgccggatatacccgccaaaccactattatggcgcaggccaatagcacgttgggcgctggcggctgggttggcaatggtgtctacgtttctggtgtgcagcgtgagtatgatgcgtttattaccaaccagttacgtgcggcgcagacgcaaagtagcggtctgactgcccgctatgagcagatgtcgaaaatcgacaatatgctctccaccagtacctcttcgctggcaacacagatgcaggatttcttcaccagcctgcaaacgctggtgagtaacgcggaagacccggcagcgcgccaggcgctgattgggaaatcagaaggattggtgaatcagtttaaaaccaccgatcaatatctgcgcgaccaggacaaacaggtcaatatcgcgataggtgccagcgttgatcagatcaacaactacgctaaacaaattgccagcctgaacgatcaaatctcgcgcctgacaggcgtgggggcaggggcgtcacctaacaatctgctggatcaacgcgatcaactggtgagcgaattaaaccagattgttggtgtagaagtcagcgttcaggatggcggcacttataacatcacgatggccaatggttactcactggttcagggaagtacggcgcggcaactggcggcagttccttccagcgctgacccttctcgtacgactgtcgcttatgttgatgggacggcaggcaatattgagatcccggagaaattactgaataccgggtcgctgggcggcattctgacattccgttctcaggatctggaccagacgcgtaatacgcttggacaactggcgctggcatttgccgaggctttcaacacccaacacaaagccggatttgatgctaacggcgatgccggtgaagatttctttgctatcggtaagcccgcggttctgcaaaacacgaaaaacaaaggtgacgttgcgatcggtgccacggtaactgatgcctccgcggtactggcgacagattacaaaatctcgttcgataataatcagtggcaggtcacccgccttgccagcaataccacttttacggtgacgccggatgccaacggtaaagtggcatttgatggtctggagttgacgtttacaggaacgcctgccgttaacgacagcttcacgctgaaaccagtaagtgacgccatcgtcaacatggatgtattaatcaccgacgaagcgaaaatagcgatggcgagcgaagaagatgcgggtgatagcgataaccgcaacggtcaggccctgctggatctgcaaagcaacagtaaaacggtgggcggtgcgaaatcctttaacgacgcttatgcctcgttagtgagtgatatcggtaataaaaccgcgacgttgaaaaccagtagcgccacgcaaggtaatgtggtgacgcagctttccaatcagcagcagtcgatttccggtgtcaatctcgatgaggagtacggaaatctgcaacgttttcagcagtattacctggcgaatgcgcaggttctgcagacggcaaacgcgatttttgatgcgctgattaacattcgctaaggggagataagatgcgtttcagtacacagatgatgtaccagcaaaacatgcgtggtatcaccaattctcaggcagaatggatgaagtacggcgaacagatgtcgacgggtaagcgagtcgttaacccttctgacgatcccattgctgcatcacaagccgtagttctctcccaggcacaggcgcaaaacagccagtacacgctggcgcgtactttcgccactcaaaaagtgtcactggaagagagtgtacttagccaggtcaccactgctatccagaatgctcaggaaaaaattgtctacgccagcaatggcaccttgagtgacgatgaccgggcctcgctggctacggatattcaggggcttcgtgaccagttgctgaatctggcaaacaccactgacggtaacgggcgctacatttttgccggttataaaacagagactgcgccgtttagcgaagagaaagggaaatacgtcggtggagcagaaagtattaaacaacaggtcgatgcttcgcgttcgatggtgatagggcacacgggtgacaaaattttcgacagtattaccagcaacgcggtagcggaaccagacggtagcgcttctgaaaccaatctttttgccatgctggatagtgccatcgcagccctgaaaacgccggtcgcggatagcgaagcggataaagaaaccgccgctgcggcgttagataaaaccaaccgcggactgaaaaactcgctgaacaatgtgctgactgttcgcgcggaattaggcacgcagctgaacgaactggagtcgctggattcattaggtagcgatcgcgctttagggcaaacgcagcagatgagcgatctggttgatgtggactggaatgcaactatttcatcttacatcatgcagcaaacggcattgcaggcatcgtataaagcatttaccgatatgcagggattgtcgctcttccagctcagcaaataatttcgctttaaaacatatcatgaaactgggtatgttttgtctgcctgctctgggatcgctggggcgggcatttttttgcctattttgcattgttggttagcaaggatgccattcgatgaattttaatatgttgattcaaagatgaaataaaaaagccctggcagttaccagggcttgattactttgagctaattattactcaacaggttgcggacgcgcaggagcggcagaggcatgatgtgttgccgtatgaccacctgcggcacctttaccttcgaaggcaaaagtagggcgctgccagtcactgtgacgcggtgcctccggaacatattccggtgctggagcgcgcgtcattggcgcggtagcgtggttatgctcaacggtgacctcaggttcgaccgcagctaccgtttcaacttctgctgcgacttcagcgactactggcgcggcaggttgagcaacaacttcaggttcagcaactacaacctcagcagtttcgacaacttcttcaatatctgccgtctcttcctgcggttcaaccaccggttctgcttgttctgcaacttcctgggctacggcaacatcagactcggtaatcacctgcggctgttcagttaccgcggcagcgatcacttcaggatgcgtcgtttcaaccacttccggttgcggttcggcaacctgaacgggggcttctacgacaccggccacttcttcaacaactggcgcgctaacaaccggttcgatagcggcggcgacagggacctcagtcaccatcggctgcacatgtacttcttcctgttcgcgctgctcttcaacctgtacatcttgcggacgtacaattggatagcggatccagactttgccagaggccagttccggagacgcgcacgctacggtcaacggcattggcgactgggttggataacgctcgtcacgatagcgacgacgacgctgaccacttacgcgcaggtgacgaggcgagcggcgagaacgacgcggcatgccaccgttgtcacggttatcagcattgttctcttcttgctgttctggtgcagtttgcgctacgactggcagcgggactttcaccagttctgtgcgtggagctggcgcttcctgaacaattggttcggcagcgacagtttcttcaaccaccggtgcgactaccgcttcttcggctacgctttgctcgtaacgcactttctgattgagctgacgctgtttacgacgcggctgaaccggacgtacacgttcttcctgttcggtttcctgaacagattgctcttcaacattcagcgccttcgcttcttgttgcgcctgacgtttatcatcattacggcggcggctacgttcacgacgcggcgcttgctgctcgtcggcggtacgcgctttttccgttacctcagcctgctgacggctctcacgcgtctcggcagtctgctgctgtgcctggcgacgattacgacggttttcttcgcgattatcgctgccttcagtacgttcactacgggtgtcgcggcgctcattacggtcacggcggttgttctgacgaggcttgcgacgatcctgttgacgttccggtttcgcttctgctttcggtgctggttgctcggtcggtttggtttcttcaccaccgctgaacagcgctttcagtgcgccgaagaagcggctcaacagcccaggttgtgcaggagctgctggtgttgccggtgcagctttcggtgctggagctacaacaggcgcggcaggttcagctggcgttggcgcaggcggcacatccggcatggcaaaggttgccagcgcaggttgttccggacgcttacgttcagcgaactcttcttcagacggcagcgccatcgcttcttcatgcagcttcggcagcatgtagcttaaggttggggtttcttcccctttacgcacgcgcagcacgtggtagtgcggggtttccatctgatcgtttggcacaattacacagcgcacaccgtcctgacgagtttcaatggcatttaccgcagaacgtttttcattcagcaggtaagaagcgattggcacaggaacaatggcgtgaacttcctgggtgttctctttcagcgcttcttcttcgatcagacgcagaatagagagcgacagcgattcgttgtcacgcacggtgccagtaccagaacaacgcggacaaacgtgatgactggattcacccagtgatgggctcaggcgctgacgggacatttccagcaggccaaagcgagaaatatggctgatttgaatacgcgcacggtcctgacgcaccgcttcacgcagacggttttctaccgcacgctggtggcgtactggcgtcatgtcgatgaagtcgataacaatcaggccgccgaggtcacgcaggcgcagctgacgagcaatctcatcggcagcttcgaggttagtgttaaacgcggtttcttcgatatcgccgccgcgggtcgcgcgtgcggagttgatgtcgatggccgttaacgcttcggtgctgtcgataacaatggaaccaccagacggcagacgaacttcacgctggaaggcggactcgatctgtgactcgatctggtagtggctgaacagcgggatctcgccggtgtacagtttgattttgctgctgaaatccgggcgacctaatgcagcgatatgctgacgtgccagttcgagcactttcgggttatcgataaggatttcgccgatgtcctgacgtaagtaatcgcggaatgcgcgaacgattacgttgctctcctgatgaatcaggaacggggccgggcggctttcagcggcttttttgatggcttcccagtgtttcagacggaagcttaaatcccattgcagcgcctcagcagatttgccgacgccagcggtgcgcacgataagccccatgccttccggcagttcaaggcttgccagtgcttcttttaattcggtacggtcgtcgccttcgatacggcgagaaatgccacccgcgcgcgggttgttcggcatcagaaccagatagctacccgccagactgataaaggtggttaatgccgcgcctttgttgccgcgctcttctttatcgatctgaacaatgacttcctgaccttcacgcaacacatctttaatgttgggacgaccatgagcactgtagttagcagggaaatattcgcgggcaatttcttttagtgggaggaaaccgtgacgttcagcgccgtaatcaacaaaagcagcttccagactcggttcaatgcgggtgattttacctttgtagatgtttgcctttttctgctcgtgccctggactttcgatatccaggtcatacagacgctgcccatctacaagggcaacgcgcaactcttcctgctgagttgcgttgattaacattcttttcatcgtaacttactcattattcttacattgacgactaagctgcgggcaaagtaacgcctttccgggtgtgaaccgatggcctcgtgtctagtcgcgtcgccaacctcacggttatcgtcagctcaaagaggcgcagagtgtcggttgcccgtttttcatgcggaaaaacagcgcaattatcaaagaaacagactgggtattactctccagaaatatttccatctaccggtaaggactgcaacccgcagcccgctaactgcctgaaagatcaatacgtcttacgccattgctgcgtggatgatcggtcgggcaaaatgggttattccgtaaaatttcttgttttaacaaggatggacacggaaacggcctcattattccactgcaagccttgttatagcaagatgacttttaccatttatcacccgcttactcacagttttttcacttcttgctggtgattggtttaataaccatcaataaagtgatcacgcagtgaagtaataaggtgcaaaagtaaatataagcatagaaaaatgagtggcgcgaatcctgttggctaattagaatcgccaaccatgaaaacagagactccatccgtaaaaattgttgctatcaccgctgacgaagcggggcaacgtatcgataactttttgcgtacccaattgaaaggcgtaccaaaaagtatgatttaccgtattttgcgtaaaggcgaagtgcgggtgaacaaaaaacgtattaagcctgaatataaactcgaagcgggtgatgaggtgcgtattccaccggttcgcgttgctgagcgggaagaagaggcggtttcgccacatctgcaaaaggtggcggcgctggcggacgtcatcttatatgaagatgatcacatcctggtgctgaataaaccttccggtacggcggtacatggcggcagtggtttaagcttcggcgttattgaaggtttgcgggcgttgcgcccggaagcgcggttccttgaactggttcatcgtcttgaccgggacacctcaggtgttttgctggtagcgaaaaaacgctcggcgttgcgttctctgcatgagcaattacgtgaaaaagggatgcaaaaagattacctggcgctggtgcgcggtcagtggcagtcgcatgtgaagagcgttcaagcaccgttactgaaaaatattctgcaaagcggcgaacgtatcgtgcgtgtgagtcaggaaggcaaaccgtcggaaacacgctttaaagtggaagaacgctatgcatttgccaccctggtgcgttgtagcccggtaacagggcgtactcaccagatccgtgtgcatacacaatatgcgggtcatccgattgcctttgacgatcgctacggtgaccgtgaatttgacaggcagctcactgaagcaggcacgggattaaatcgcctgttcctgcacgctgcagcgttgaagtttactcatccggggaccggtgaggtgatgcgtatcgaagctccgatggatgaaggtttgaagcgttgtttgcaaaagctgcgtaacgcgcgctaatacaagcatataaacctgataatgggcggttggcctgataaggcgtttacgccgcatcaggccgccagcaccgattgccggatgcgacgtaaccacatccggcgcaaaaaactatcccatcagcgggtttttcccttcccgacgtaacatctgacacagcgcgattagcggtaaaccaaccagcgtgttaggatcacgcccctctaaacgctcaaacagcgtaatgccaaatccttcactcttaaagctacccgcgcagtgcaggggatgctctttacgcacgtaattatcaatctccgcctcgctcaggtgacggaaatggacgtcaaaaggctccacttctgtttgcagatgcccattcgccgaattaaacaacgccagtccagtatagaaggtgacgatattgccgctggctttgcgtaattgcagacgggcattttcttccgttaacggtttaccggtgatttcgccatcaagaacacatacctggtctgaaccaataattaaatgatccggataacgtgacgccagagattgcgctttttcttgtgccagtcgaagcaccaactgtcgcggtgattcgtcgctgcgtggggtttcgtcgacctctggtgctgcacattcaaaagagatttgcagtttttccagaagagcgcgacgccatggcgaggtggaggctaaaataagtttaggcatatttttttccatcagatatagcgtattgatgatagccattttaaactatgcgcttcgttttgcaggttgatgtttgttatcagcactgaacgaaaataaagcagtaacccgcaatgtgtgcgaattattggcaaaaggcaaccacaggctgcctttttctttgactctatgacgttacaaagttaatatgcgcgccctatgcaaaaggtaaaattacccctgactctcgatccggttcgtacggctcaaaaacgccttgattaccagggtatctatacccctgatcaggttgagcgcgtcgccgaatccgtagtcagtgtggacagtgatgtggaatgctccatgtcgttcgctatcgataaccaacgtctcgcagtgttaaacggcgatgcgaaggtgacggtaacgctcgagtgtcagcgttgcgggaagccgtttactcatcaggtctacacaacgtattgttttagtcctgtgcgttcagacgaacaggctgaagcactgccggaagcgtatgaaccgattgaggttaacgaattcggtgaaatcgatctgcttgcaatggttgaagatgaaatcatcctcgccttgccggtagttccggtgcatgattctgaacactgtgaagtgtccgaagcggacatggtctttggtgaactgcctgaagaagcgcaaaagccaaacccatttgccgtattagccagcttaaagcgtaagtaattggtgctccccgttggatcggggataaaccgtaattgaggagtaaggtccatggccgtacaacagaataaaccaacccgttccaaacgtggcatgcgtcgttcccatgacgcgctgaccgcagtcaccagcctgtctgtagacaaaacttctggtgaaaaacacctgcgtcaccacatcactgccgacggttactaccgcggccgcaaggtcatcgctaagtaatcacgcatctgcgtgatgaagcttagtgaggattttccccaggcaactggggaaagaccaaaccgggcggcgacgataccttgacacgtctaaccctggcgttagatgtcatgggaggggattttggcccttccgtgacagtgcctgcagcattgcaggcactgaattctaattcgcaactcactcttcttttagtcggcaattccgacgccatcacgccattacttgctaaagctgactttgaacaacgttcgcgtctgcagattattcctgcgcagtcagttatcgccagtgatgcccggccttcgcaagctatccgcgccagtcgtgggagttcaatgcgcgtggccctggagctggtgaaagaaggtcgagcgcaagcctgtgtcagtgccggtaataccggggcgctgatggggctggcaaaattattactcaagcccctggaggggattgagcgtccggcgctggtgacggtattaccacatcagcaaaagggcaaaacggtggtccttgacttaggggccaacgtcgattgtgacagcacaatgctggtgcaatttgccattatgggctcagttctggctgaagaggtggtggaaattcccaatcctcgcgtggcgttgctcaatattggtgaagaagaagtaaagggtctcgacagtattcgggatgcctcagcggtgcttaaaacaatcccttctatcaattatatcggctatcttgaagccaatgagttgttaactggcaagacagatgtgctggtttgtgacggctttacaggaaatgtcacattaaagacgatggaaggtgttgtcaggatgttcctttctctgctgaaatctcagggtgaagggaaaaaacggtcgtggtggctactgttattaaagcgttggctacaaaagagcctgacgaggcgattcagtcacctcaaccccgaccagtataacggcgcctgtctgttaggattgcgcggcacggtgataaaaagtcatggtgcagccaatcagcgagcttttgcggtcgcgattgaacaggcagtgcaggcggtgcagcgacaagttcctcagcgaattgccgctcgcctggaatctgtatacccagctggttttgagctgctggacggtggcaaaagcggaactctgcggtagcaggacgctgccagcgaactcgcagtttgcaagtgacggtatataaccgaaaagtgactgagcgtacatgtatacgaagattattggtactggcagctatctgcccgaacaagtgcggacaaacgccgatttggaaaaaatggtggacacctctgacgagtggattgtcactcgtaccggtatccgcgaacgccacattgccgcgccaaacgaaaccgtttcaaccatgggctttgaagcggcgacacgcgcaattgagatggcgggcattgagaaagaccagattggcctgatcgttgtggcaacgacttctgctacgcacgctttcccgagcgcagcttgtcagattcaaagcatgttgggcattaaaggttgcccggcatttgacgttgcagcagcctgcgcaggtttcacctatgcattaagcgtagccgatcaatacgtgaaatctggggcggtgaagtatgctctggtcgtcggttccgatgtactggcgcgcacctgcgatccaaccgatcgtgggactattattatttttggcgatggcgcgggcgctgcggtgctggctgcctctgaagagccgggaatcatttccacccatctgcatgccgacggtagttatggtgaattgctgacgctgccaaacgccgaccgcgtgaatccagagaattcaattcatctgacgatggcgggcaacgaagtcttcaaggttgcggtaacggaactggcgcacatcgttgatgagacgctggcggcgaataatcttgaccgttctcaactggactggctggttccgcatcaggctaacctgcgtattatcagtgcaacggcgaaaaaactcggtatgtctatggataatgtcgtggtgacgctggatcgccacggtaatacctctgcggcctctgtcccgtgcgcgctggatgaagctgtacgcgacgggcgcattaagccggggcagttggttctgcttgaagcctttggcggtggattcacctggggctccgcgctggttcgtttctaggataaggattaaaacatgacgcaatttgcatttgtgttccctggacagggttctcaaaccgttggaatgctggctgatatggcggcgagctatccaattgtcgaagaaacgtttgctgaagcttctgcggcgctgggctacgacctgtgggcgctgacccagcaggggccagctgaagaactgaataaaacctggcaaactcagcctgcgctgttgactgcatctgttgcgctgtatcgcgtatggcagcagcagggcggtaaagcaccggcaatgatggccggtcacagcctgggggaatactccgcgctggtttgcgctggtgtgattgatttcgctgatgcggtgcgtctggttgagatgcgcggcaagttcatgcaagaagccgtaccggaaggcacgggcgctatggcggcaatcatcggtctggatgatgcgtctattgcgaaagcgtgtgaagaagctgcagaaggtcaggtcgtttctccggtaaactttaactctccgggacaggtggttattgccggtcataaagaagcggttgagcgtgctggcgctgcctgtaaagcggcgggcgcaaaacgcgcgctgccgttaccagtgagcgtaccgtctcactgtgcgctgatgaaaccagcagccgacaaactggcagtagaattagcgaaaatcacctttaacgcaccaacagttcctgttgtgaataacgttgatgtgaaatgcgaaaccaatggtgatgccatccgtgacgcactggtacgtcagttgtataacccggttcagtggacgaagtctgttgagtacatggcagcgcaaggcgtagaacatctctatgaagtcggcccgggcaaagtgcttactggcctgacgaaacgcattgtcgacaccctgaccgcctcggcgctgaacgaaccttcagcgatggcagcggcgctcgagctttaaaagaggaaaatcatgaattttgaaggaaaaatcgcactggtaaccggtgcaagccgcggaattggccgcgcaattgctgaaacgctcgcagcccgtggcgcgaaagttattggcactgcgaccagtgaaaatggcgctcaggcgatcagtgattatttaggtgccaacggcaaaggtctgatgttgaatgtgaccgacccggcatctatcgaatctgttctggaaaaaattcgcgcagaatttggtgaagtggatatcctggtcaataatgccggtatcactcgtgataacctgttaatgcgaatgaaagatgaagagtggaacgatattatcgaaaccaacctttcatctgttttccgtctgtcaaaagcggtaatgcgcgctatgatgaaaaagcgtcatggtcgtattatcactatcggttctgtggttggtaccatgggaaatggcggtcaggccaactacgctgcggcgaaagcgggcttgatcggcttcagtaaatcactggcgcgcgaagttgcgtcacgcggtattactgtaaacgttgttgctccgggctttattgaaacggacatgacacgtgcgctgagcgatgaccagcgtgcgggtatcctggcgcaggttcctgcgggtcgcctcggcggcgcacaggaaatcgccaacgcggttgcattcctggcatccgacgaagcagcttacatcacgggtgaaactttgcatgtgaacggcgggatgtacatggtctgaccgcgatttgcacaaaatgctcatgttgcgcgcagtctgcgtggttatgagtaataattagtgcaaaatgatttgcgttattggggggtaaggcctcaaaataacgtaaaatcgtggtaagacctgccgggatttagttgcaaatttttcaacattttatacactacgaaaaccatcgcgaaagcgagttttgataggaaatttaagagtatgagcactatcgaagaacgcgttaagaaaattatcggcgaacagctgggcgttaagcaggaagaagttaccaacaatgcttctttcgttgaagacctgggcgcggattctcttgacaccgttgagctggtaatggctctggaagaagagtttgatactgagattccggacgaagaagctgagaaaatcaccaccgttcaggctgccattgattacatcaacggccaccaggcgtaagtgaacatctccaggcggtcgttcgaccgcctgagttttatctttttgtcccactagaatcattttttccctccctggaggacaaacgtgtctaagcgtcgtgtagttgtgaccggactgggcatgttgtctcctgtcggcaataccgtagagtctacctggaaagctctgcttgccggtcagagtggcatcagcctaatcgaccatttcgatactagcgcctatgcaacgaaatttgctggcttagtaaaggattttaactgtgaggacattatctcgcgcaaagaacagcgcaagatggatgccttcattcaatatggaattgtcgctggcgttcaggccatgcaggattctggccttgaaataacggaagagaacgcaacccgcattggtgccgcaattggctccgggattggcggcctcggactgatcgaagaaaaccacacatctctgatgaacggtggtccacgtaagatcagcccattcttcgttccgtcaacgattgtgaacatggtggcaggtcatctgactatcatgtatggcctgcgtggcccgagcatctctatcgcgactgcctgtacttccggcgtgcacaacattggccatgctgcgcgtattatcgcgtatggcgatgctgacgtgatggttgcaggtggcgcagagaaagccagtacgccgctgggcgttggtggttttggcgcggcacgtgcattatctacccgcaatgataacccgcaagcggcgagccgcccgtgggataaagagcgtgatggtttcgtactgggcgatggtgccggtatgctggtacttgaagagtacgaacacgcgaaaaaacgcggtgcgaaaatttacgctgaactcgtcggctttggtatgagcagcgatgcttatcatatgacgtcaccgccagaaaatggcgcaggcgcagctctggcgatggcaaatgctctgcgtgatgcaggcattgaagcgagtcagattggctacgttaacgcgcacggtacttctacgccggctggcgataaagctgaagcgcaggcggtgaaaaccatcttcggtgaagctgcaagccgtgtgttggtaagctccacgaaatctatgaccggtcacctgttaggtgcggcgggtgcagtagaatctatctactccatcctggcgctgcgcgatcaggctgttccgccaaccatcaacctggataacccggatgaaggttgcgatctggatttcgtaccgcacgaagcgcgtcaggttagcggaatggaatacactctgtgtaactccttcggcttcggtggcactaatggttctttgatctttaaaaagatctaagttgtcattttccacccttataaaaggtccgcttgcgggccttttttcttagcttttattccgacttgttccgtagtgaacatgctgccacactaacaattctctgataaggagccggtatgttcttaattaacggtcataagcaggaatcgctggcagtaagcgatcgggcaacgcagtttggtgatggttgttttaccaccgccagagttatcgacggtaaagtcagtttgttatcggcgcatatccagcgactacaggatgcttgtcagcggttgatgatttcctgtgacttctggcctcagcttgaacaagagatgaaaacgctggcagcagaacagcaaaatggtgtgctgaaagtcgtgatcagtcgcggtagtggcgggcgagggtacagcacattgaacagcggaccggcaacgcggattctctccgttacggcttatcctgcacattacgaccgtttgcgtaacgaggggattacgttggcgctaagcccggtgcggctggggcgcaatcctcatcttgcaggtattaaacatctcaatcgtcttgagcaagtattgattcgctctcatcttgagcagacaaacgctgatgaggcgctggtccttgacagcgaagggtgggttacggaatgctgtgcggctaatttgttctggcggaagggcaacgtagtttatacgccgcgactggatcaggcaggtgttaacggcattatgcgacaattctgtatccgtttgctggcacaatcctcttatcagcttgtcgaagtgcaagcctctctggaagagtcgttgcaggcagatgagatggttatttgtaatgcgttaatgccagtgatgcccgtatgtgcctgtggcgatgtctccttttcgtcagcaacgttatatgaatatttagccccactttgtgagcgcccgaattagtcatgaaaaaagtgttattgataatcttgttattgctggtggtactgggtatcgccgctggtgtgggcgtctggaaggttcgccatcttgccgacagcaaattgcttatcaaagaagagacgatatttaccctgaagccagggaccggacgtctggcgctcggtgaacagctttatgccgataagatcatcaatcgtccacgggtttttcaatggctgctgcgtatcgaaccggatctttctcactttaaagccgggacttaccgctttacaccgcagatgaccgtgcgcgagatgctgaaattgctggaaagcggtaaagaagcacagttccctctgcgactggtagaagggatgcgtctgagcgattacctcaagcaattgcgtgaggccccgtatatcaagcatacgctgagcgatgataagtacgccaccgtagcgcaggcacttgaactggaaaacccggagtggattgaaggttggttctggccagacacctggatgtataccgccaataccaccgatgtcgcgttactcaagcgagcgcacaagaaaatggtgaaagcggtcgatagcgcctgggaagggcgtgcggacggtctgccttataaagataaaaaccagttggtgacgatggcatcaattatcgaaaaagaaaccgccgttgccagtgaacgcgataaggttgcctcagtatttatcaaccgtttacgcattggtatgcgcctgcagaccgacccgaccgtgatttacgggatgggagagcgttataatggcaaactttctcgtgcagacctggaaacgccgacagcgtataacacctataccattaccggtctgccgccaggtgcgatagcgacgccgggggcggattcgctgaaggctgctgcgcatccggcaaaaacgccgtatctctattttgtggccgatggtaaaggtggtcacacgtttaataccaatcttgccagtcataacaagtctgtgcaggattatctgaaagtgcttaaggaaaaaaatgcgcagtaagtatatcgtcattgaggggctggaaggcgcaggcaaaactaccgcgcgtaatgtggtggttgagacgctcgagcaactgggtatccgcgacatggttttcactcgggaacctggcggtacgcaacttgccgaaaagttaagaagcctggtgctggatatcaaatcggtaggcgatgaagtcattaccgataaagccgaagttctgatgttttatgccgcgcgcgttcaactggtagaaacggtcatcaaaccagctctggctaacggcacctgggtgattggcgatcgccacgatctctccactcaggcgtatcagggcggcggacgtggtattgaccaacatatgctggcaacactgcgtgatgctgttctcggggattttcgccccgacttaacgctctatctcgatgttaccccggaagttggcttaaaacgcgcgcgtgcgcgcggcgagctggatcgtattgagcaagaatctttcgatttctttaatcgcacccgcgcccgctatctggaactggcagcacaagataaaagcattcataccattgatgccacccagccgctggaggccgtgatggatgcaatccgcactaccgtgacccactgggtgaaggagttggacgcatgagatggtatccatggttacgacctgatttcgaaaaactggtagccagctatcaggccggaagaggtcaccatgcgctactcattcaggcgttaccgggcatgggcgatgatgctttaatctacgccctgagccgttatttactctgccaacaaccgcagggccacaaaagttgcggtcactgtcgtggatgtcagttgatgcaggctggcacgcatcccgattactacaccctggctcccgaaaaaggaaaaaatacgctgggcgttgatgcggtacgtgaggtcaccgaaaagctgaatgagcacgcacgcttaggtggtgcgaaagtcgtttgggtaaccgatgctgccttactaaccgacgccgcggctaacgcattgctgaaaacgcttgaagagccaccagcagaaacttggtttttcctggctacccgcgagcctgaacgtttactggcaacattacgtagtcgttgtcggttacattaccttgcgccgccgccggaacagtacgccgtgacctggctttcacgcgaagtgacaatgtcacaggatgcattacttgccgcattgcgcttaagcgccggttcgcctggcgcggcactggcgttgtttcagggagataactggcaggctcgtgaaacattgtgtcaggcgttggcatatagcgtgccatcgggcgactggtattcgctgctagcggcccttaatcatgaacaagctccggcgcgtttacactggctggcaacgttgctgatggatgcgctaaaacgccatcatggtgctgcgcaggtgaccaatgttgatgtgccgggcctggtcgccgaactggcaaaccatctttctccctcgcgcctgcaggctatactgggggatgtttgccacattcgtgaacagttaatgtctgttacaggcatcaaccgcgagcttctcatcaccgatcttttactgcgtattgagcattacctgcaaccgggcgttgtgctaccggttcctcatctttaagagagacatcatgtttttagtcgactcacactgccatctcgatggtctggattatgaatctttgcataaggacgtggatgacgttctggcgaaagccgccgcacgcgatgtgaaattttgtctggcagtcgccacaacattaccgggttatttacatatgcgggatctggtaggcgaacgtgacaacgtcgtattttcttgtggcgtgcatccactcaaccagaatgatccctacgatgtagaagatttacgccgtctggcggcagaagagggtgttgtagcgctgggtgaaaccgggctggattattattacacgccggaaactaaagtacgtcagcaagagtccttcatccatcatatccagattggtcgtgaactgaacaagccggttatcgtccatacccgtgacgcccgtgccgatacgctggcaattctgcgcgaagaaaaagtgacggattgcggtggcgtactacactgttttacagaggacagagaaacggcgggtaaattactggatctcggattttacatctccttttccggcattgtgaccttccgtaatgcggagcaactgcgcgatgctgcgcgttatgtccccctggatcggttactggtggaaactgactcaccttaccttgcgccggtaccgcatcgaggaaaagagaatcaacctgcgatggttcgtgacgttgcagaatacatggctgtgttgaaaggtgttgccgttgaagaactggcgcaggtaaccaccgataacttcgcccgtctgtttcacatcgacgcttcccgccttcaatccatccgttgaatgagtttttttaaagctcgtaattaatggctaaaacgagtaaagttcaccgccgaaaattgggcggtgaataaccacgtttgaaatattgtgacatatgttttgtcaaaatgtgcaacttctccaatgatctgaagttgaaacgtgatagccgtcaaacaaattggcactgaattattttactctgtgtaataaataaagggcgcttagatgccctgtacacggcgaggctctccccccttgccacgcgtgagaacgtaaaaaaagcacccatactcaggagcactctcaattatgtttaagaatgcatttgctaacctgcaaaaggtcggtaaatcgctgatgctgccggtatccgtactgcctatcgcaggtattctgctgggcgtcggttccgcgaatttcagctggctgcccgccgttgtatcgcatgttatggcagaagcaggcggttccgtctttgcaaacatgccactgatttttgcgatcggtgtcgccctcggctttaccaataacgatggcgtatccgcgctggccgcagttgttgcctatggcatcatggttaaaaccatggccgtggttgcgccactggtactgcatttacctgctgaagaaatcgcctctaaacacctggcggatactggcgtactcggagggattatctccggtgcgatcgcagcgtacatgtttaaccgtttctaccgtattaagctgcctgagtatcttggcttctttgccggtaaacgctttgtgccgatcatttctggcctggctgccatctttactggcgttgtgctgtccttcatttggccgccgattggttctgcaatccagaccttctctcagtgggctgcttaccagaacccggtagttgcgtttggcatttacggtttcatcgaacgttgcctggtaccgtttggtctgcaccacatctggaacgtacctttccagatgcagattggtgaatacaccaacgcagcaggtcaggttttccacggcgacattccgcgttatatggcgggtgacccgactgcgggtaaactgtctggtggcttcctgttcaaaatgtacggtctgccagctgccgcaattgctatctggcactctgctaaaccagaaaaccgcgcgaaagtgggcggtattatgatctccgcggcgctgacctcgttcctgaccggtatcaccgagccgatcgagttctccttcatgttcgttgcgccgatcctgtacatcatccacgcgattctggcaggcctggcattcccaatctgtattcttctggggatgcgtgacggtacgtcgttctcgcacggtctgatcgacttcatcgttctgtctggtaacagcagcaaactgtggctgttcccgatcgtcggtatcggttatgcgattgtttactacaccatcttccgcgtgctgattaaagcactggatctgaaaacgccgggtcgtgaagacgcgactgaagatgcaaaagcgacaggtaccagcgaaatggcaccggctctggttgctgcatttggtggtaaagaaaacattactaacctcgacgcatgtattacccgtctgcgcgtcagcgttgctgatgtgtctaaagtggatcaggccggcctgaagaaactgggcgcagcgggcgtagtggttgctggttctggtgttcaggcgattttcggtactaaatccgataacctgaaaaccgagatggatgagtacatccgtaaccactaatccgtaagacgttggggagactaaggcagccagatggctgccttttttacaggtgttattcagaattgatacgtgccggtaatgctgaaattacgcggtgtgccgtagacgatagaaccttccacgttggtatcgtaggttttgtcgaacaggttattgacgttcccctgtaacgagaagtttttcgtcacctggtagcgggtgaagagatccaccagcgcgtagctaccttgctcggcgcggaaggtgccatacggcgtcacggtgtcggtatacacgcgattttgccagttaacaccaccgccgaccgtcaactctggcatgacaggcaaccgatagctggtgaacattttaaccgtggtgcgtggcagattaggattaacggcgtttccttcgttatcctctgcaatatagcgcgttgcgccaaatgtcagctgccagttgtcggtaattgcgccgttgagttcaaattccacccctttactgactgtcccatccaccgctttataggcggtttcgccgttgctgccggggataggtgtaccggtggactgagcgacattatcctgctcaatacggaagatggctaacgtggtggtcagacggctattcatccagtccgatttcagacccagctcgtagttgttaccggtgattggagccagatatttgcctgaactgtcacgatcattttgcggctggaaaatagaggtatagctggcgtaggtcgaccagttgtcattgatgtcaaacaccagaccagcgtaaggcgtggtgtggtttttctccatgctgtaagtcagcgtatcaacccgccagttggtataacgtgcgccgaggatcagatgcagcggatcggcaagggtgacacgagtggcagcatataacgatttcatatgtgtggtatcgtcctgcgccaggctctgtggtgaccagtcggtttgtgggaaattgccattaaagttgtagaaactgccaatttcatccgggaagatgttggcccatgaactgaagtaacgattgttttgtttgctgtaactgccaccaaacattagattgtgctgacgaccaaacaattcataactaccgtcagcgaacaaatccagcgcatcaactttacgtttgccactgttccaaccggtgccgccgacataatcaaagccaggtccataattactgtatggcccaaccagcataccatccgctttgtttacataggcatcgacatacatcattttgctgtcaaattcgacttcagagtgggtggcattcagtgtcgcttgccaggtatcagcaaactgctgcttcagggtcataaagaccttgttgatctctttatcgttgtacgcccagtcaggtgcggtactgcgtgcgcgatcgtaactgttgctgctgccatcagtattccagcgcggtaaaccgccccaggtagggctattaacatcaatgcgctgatattcgtaaccggctgaaagcgtcgtaagatcgcctaaatcagcatcgacaatgcccgagaagaaggtcttttcactgttgtagcggtccagccatgagtcgttattctggtagccgccgacaattcgcgcgcggattttaccgtcttcggtgagtgggctttgtaaatccgccacataccgttctttgttccagctaccgtattccgccgagacatcgcctttaaattcacgactggtcgcgtgttttcgaaccatattaattgccgcagatggattacccgtcccggtcatgagtcctgtcgcgccacgcactacttctacgcgttcaaagagtgccatatcagaaagtgcgtcgcccagattccagcgcgattcaaaataggtggggataccatcaaccatatagttatcgatctggaatccgcgggaataataaagagcacgatcggaatccgcctgacttttgctgatccccagcgtgttttccatcacttcgcccagcgtttgtaactgctgatcttccatccgctgctggctaacaatagtgaccgactgaggaatatcacgttgagtcatctgcattttggtacccgcagaggtagacgttacgctgtaatcattttcgccatcatctggagctgtggctgaaccctcaacaatcaccgtttcttcagtggctggtgcagcaaaagcggcagaaggtaatagtgccagtgctatgcaaccggcaagtagtgacggtttggtgatggcttgatattgattatccctgttaaattgtgttgaaagcatttgaaatctcttggtttatgttgtcgtcaggctcatgccggaggagggtgatgagcgattatatttagtgtgcgaataattttgtttgtaaatgcaaatgagaaatatacgcattcatatttgtcatgtaaaccaaacagagaatgtcttttcagcgcattcgcaggcagaaatgggaataatggcgatatatacggcagcaaaacgattttttgcttaagaaatcgtgagttaaggttgaaagagcaggtttaactcgaccatactctatactcgcagtgtggcgcggcgtagcatggcgcaacgcatggctatttgaaaaaggaaaatgtcgtggcagaagaaactatattcagcaaaattattcgtcgtgagatcccctccgatatcgtctaccaggatgatctggtaacggcgtttcgcgatatttcgccgcaagcgccaacgcatattctgatcattccgaatatcctcattccgactgtgaacgacgtctcagctgagcatgagcaggcgctgggacgcatgatcaccgtagcggcaaaaattgctgagcaagaaggtattgccgaagatggctatcgtctgatcatgaataccaaccgccatggcggacaagaggtttaccacatccatatgcacttgttgggtggccgtccgctgggaccaatgctggcgcataaaggtctgtaacgatgagaaaaggatgctttgggctggtgtctctggtgttgttactgctggtgggctgtcgttcacatccggaaattccggtgaatgatgagcaatcgctggtgatggagtcatctttattggctgcgggcatcagtgcagaaaagcccttcctttcgacgtctgatattcaaccttcagcatcctcaacgctttataacgaaaggcaagaacccgttaccgttcattatcgtttttactggtatgacgccagagggctggagatgcatcctctggaaaggccacgcagcgttaccattcccgcacattcggcggtaacgctgtacggcagcgccaattttctgggggcgcacaaagtcagactttatctatatttgtaaggggtgaatcttgatgacaaaaatgagtcgctacgccttgattaccgcgctggcgatgtttctcgccgggtgtgtggggcaacgtgaacctgcaccggtagaagaagtgaaaccagcgccggaacaaccagccgagccacaacagcctgtccccacagtgccctcggtgccgacgatcccgcagcagccaggcccaattgagcacgaagatcaaactgcaccgcctgcgccgcatattcgccattatgactggaatggcgcaatgcagccgatggtcagtaagatgcttggggctgacggggtgactgcgggtagcgtcctgctggttgatagcgttaacaaccgtactaacggttcgctgaatgccgcagaagcgaccgaaacgctgcgaaatgcgctggctaataacgggaaatttaccctggtttccgcccagcaactgtcgatggcgaagcaacagttaggtttgtcgccgcaggacagtttaggcacccgtagtaaagccataggcattgcccgcaatgtcggcgctcattacgtgctgtactccagcgcctctggcaacgttaacgctccgaccctacaaatgcagctgatgctggtgcagacgggcgaaattatctggtcaggtaaaggtgccgtttcgcagcaataatcccatcacgcgcgacgaattgctgtcgcgctttttcccgcagtatcatcccgtcacgacgtttaatagtgggcttagtggcgggagttttctcattgaacatcagggccagcgttttgttgtgcgtcagccgcacgatcctgatgcgccgcagtccgcgttcttgcgccagtatcgggctttatcacaactacccgcatgcattgcaccgaagccgcatttatatctccgtgactggatggtagtcgactatctgcccggcgcggtaaaaacgtatttgccggataccaacgaactggcaggcttgctgtattatctacatcaacaaccacgttttggctggcgaataacgctgttgccgttactggaactgtactggcagcaaagcgatccggcgcggcggacagtgggttggctgcgaatgttaaaacgtctgcgcaaagcgcgggaaccacggcctttacgcttaagtccattgcatatggatgtccacgccggaaatttagtgcatagcgcgtcagggttaaaactcatcgactgggagtatgccggagatggtgatatcgcgctggaactggcggcggtgtgggtggaaaatactgaacagcaccggcaattggtcaatgactatgccactcgcgcgaagatttatccggcgcaattatggcgtcaggtcaggcgatggtttccctggctgctgatgctcaaagcagggtggtttgagtaccgctggcgacaaaccggcgatcaacaatttatcaggctggccgatgacacctggcggcagctattaataaaacaataaggagagcagtgtgggtccagtaatgttggatgtcgaaggttacgaactggacgcggaagagcgtgaaatactggcgcatccgctggtgggagggctgattctctttacgcgtaactatcatgatcctgcccagttacgtgaactggtgcgccagatccgcgcagcttcgcgcaatcgtctggtggtggcggttgatcaggaaggtggacgcgtgcagcgttttcgtgaaggttttacccgcttgccagcggcgcaatcattcgctgcgctgtcaggaatggaagagggtggcaaactggcgcaggaggcaggttggttgatggccagcgaaatgatcgctatggatattgatatcagctttgcgcctgtgctggatgtcgggcatatcagcgcggcgattggcgagcgttcttatcatgccgatccacaaaaagccctggcaattgccagccggtttattgatggtatgcatgaagccggaatgaaaacgaccgggaaacacttcccaggacacggtgcagtaacggcagactcacacaaagaaacaccgtgcgatccacgtccacaagcggagattcgcgctaaagatatgtcggtcttcagttccttaatccgcgaaaataaactcgacgccattatgcctgcgcatgtgatctacagtgatgttgatccgcgtccggcgagcggttctccctactggctgaaaaccgttttgcgtcaggaactgggttttgacggcgtgattttctctgacgatttatcgatggaaggtgccgcgattatgggcagttatgccgaacgcgggcaggcttcactggatgcgggttgcgatatgatcctggtctgcaataatcgtaaaggggccgtcagcgtgttagataatctgtcaccgatcaaggcagaacgtgttacacgtttgtatcataaaggttcattttcgcgacaggaactgatggactcggctcgctggaaagcgatcagcacccgtctgaatcagttacatgaacgctggcaggaagagaaagcaggtcactaaccctggcttatgtgaggaagcgatgattatctatttacacggttttgactctaacagtccgggtaaccacgagaaagtcttacaattgcagtttattgacccggatgtacgcttgataagctacagtacgcggcatccgaaacatgatatgcagcatctgcttaaagaagtggacaaaatgttgcaactgaacgttgacgagcgtccgctaatttgcggcgttggcttgggcggatactgggcggaacggattggttttctttgcgacatccgccaggtgatcttcaaccctaatttgttcccttatgagaacatggaaggcaagattgatcgcccggaagagtatgccgatattgccactaagtgtgtgaccaacttccgtgagaagaatcgcgatcgttgcctggtgattttgtcgcgtaatgatgaagcgcttaacagccagcggacatctgaagagttgcatcattattacgagattgtctgggacgaagagcagacgcacaaattcaagaatatctccccgcatttacagcgcattaaagcgttcaaaaccctcgggtaaatgccctcgtcgcatcaggtaaccttgccggtacctgatgcgctccgaattctgtgggtcggataaggcgtccacgccgcatccgacagtcgagcatcaatgcctgatgcgcttcttatcaggcctaccgaacgccctgcatacacccctcactctatatcactctcacaaattcgctcaaataataaacaataaactctgttttttgatctcacccggtaaagtcgcctatcttttcagcaacaaaacttgattaacatcaattttggtatgaccaatgcaccattcatgttattctcaatagcgaagaacattttcattgctgtaacctgttgttaattaagagctatgttaataaccattaattaacaattggttaataaatttaagggggtcacgttgactacgccattgaaaaagattgtgattgtcggcggcggtgctggtgggctggaaatggcaacacagctggggcataagctgggacgcaagaaaaaagccaaaattacgctggtcgatcgtaaccacagccacctgtggaaaccgctgctgcacgaagtggcgactggctcgcttgatgaaggcgtcgatgcgttgagctatctggcccatgcgcgcaatcatggtttccagttccagctgggttccgtcattgatattgatcgtgaagcgaaaacaatcactattgcagaactgcgcgacgagaaaggtgaactgctggttccggaacgtaaaatcgcctatgacaccctggtaatggcgctgggtagcacctctaacgatttcaatacgccaggtgtcaaagagaactgcattttcctcgataacccgcaccaggcgcgtcgcttccaccaggagatgctgaatttgttcctgaaatactccgccaacctgggcgcgaatggcaaagtgaacattgcgattgtcggcggcggcgcgacgggtgtagaactctccgctgaattgcacaacgcggtcaagcaactgcacagctacggttacaaaggcctgaccaacgaagccctgaacgtaacgctggtagaagcgggagaacgtattttgcctgcgttaccgccacgtatctctgctgcggcccacaacgagctaacgaaacttggcgttcgcgtgctgacgcaaaccatggtcaccagtgctgatgaaggcggcctgcacactaaagatggcgaatatattgaggctgatctgatggtatgggcagccgggatcaaagcgccagacttcctgaaagatatcggtggtcttgaaactaaccgtatcaaccagctggtggtggaaccgacgctgcaaaccacccgcgatccagacatttacgctattggcgactgcgcgtcatgcccgcgtccggaagggggctttgttccgccgcgtgctcaggctgcacaccagatggcgacttgcgcaatgaacaacattctggcgcagatgaacggtaagccgctgaaaaattatcagtataaagatcatggttcgctggtatcgctgtcgaacttctccaccgtcggtagcctgatgggtaacctgacgcgcggctcaatgatgattgaaggacgaattgcgcgctttgtatatatctcgctataccgaatgcatcagattgcgctgcatggttactttaaaaccggattaatgatgctggtggggagtattaaccgcgttatccgtccgcgtttgaagttgcattaatcgacgtacactggcggatgtggcataaacgcctcatccgcccttgaggaacagcgcgatcggcagccgcgttgtatcaggcatcctttcagactcctccgaatccttaagtatttccagccattcccgcgcttttcatcttctgtctgatagctgcttttctccttcgcttgcatgattggcataactgcaaagaaggaggtgttcccgtgaataaatcaatgttggcgggtatcgggattggtgtcgcagctgcgctgggcgtagcggcagtggccagtctgaacgtgtttgaacggggcccgcaatacgctcaggttgtttctgcaaccccaatcaaggaaacggttaaaacaccgcgtcaggagtgtcgcaacgtcacagtgacccatcgtcgaccggtgcaggatgaaaatcgcattaccgggtcggtgctcggcgctgttgctggcggcgtgatagggcatcagtttggtggtggtcgcggtaaagatgtcgccactgttgtgggggcgctgggtggtggatatgccggtaaccagatccagggctctctccaggaaagcgatacttacacgactacgcaacagcgttgtaaaacggtgtatgacaagtcagaaaaaatgctcggttatgatgtgacctataagattggcgatcagcagggcaaaatccgcatggaccgcgatccgggtacgcagatcccgctagatagcaacgggcaactgattttgaataacaaagtataacaaggctgtactctgcaatttggcccctcattcgctcaggctgaggggctttttttgcgacttatttcaccagttcgggccataaacgcaaagtcgttccggcaatctgcatcagtttttccagcgatgcaccttcgcgtgcgctgatcgacatcccctgaataatacaattaaggaattctgccagatgtgtcacgtcacagtggggcgggatttccccgcgcgcttgtcgttgacataaaaactgctgcaaagtgcgctcttgcatcgcatggcgtgatttcaacgtattggcgatatctcctgaatctggggagagggtggtgcagttgttgatcatgaagcagcctgccggggtgtctttgctggtaaagcagttggcgatggcagcaaaatagtcagccagcgcagactccacgcttttctcttcacaaaacagctgtgcttcatgcttagcggcaaaacgatcgatatagcggtcgagaacggcacgaaataacccctctttgttggtaaattccgcgtatagcgtgggcgctttggctccggtcgcttcgacgaggtccgcaagagaagtcgcttcataaccgtgttgccagaacaatttcatggccttatcaagcgcggcatccctgtcgaacacttttgggcggccacggcttttttttacacattgtgttgagtcagttgccatgatgccgttgtacctggtgactgtgaatgaaaggttattataaaaataatcacctccgttcaccagtccagatcccataaaaataattgctttctatttaactgaaatttaaagatttttaaattaattaatgattgttataaaaaatatcttgtatgtgatccagatcacatctatcatttagttatcgatcgttaagtaattgcttgcgacgtcattcatctgcataaggccactattatgaaaaacgtaaaaaccctcatcgctgcggcgattttaagctccatgtcatttgccagctttgcggctgtcgaagttcagtcaacgccagaaggccaacaaaaagtcggtacaatcagtgctaacgcggggacaaatctgggatcgctggaagagcagctggcgcaaaaagcggatgagatgggcgcaaaatctttccgtattacttctgtaaccggtccgaataccctccatggaacagcagtaatttataaataagcattaaccctcattaatgcctgctactgctgattttttccccgcgacatgccgtgtcgcggggatttttttatccgggctttacagcgtttgtgggctcacttgatgacggcggacatccaccggcatcccggaacggacatccatcacatgttgcatcacttcagcgtcagtttgtgctgcatctttaaatgattgcattgcgctattcagcgtaattggcagcagctgcggatcgtcatcaatcttctctgacagcggctgatgtacttcaaccagacgcgcaccgtttggttcggcagagacttttatcggagtgttgatgatattcactttggtgcctggggtgacctggctaaagagtgttttgatatcgtcatcccgcagacgaatacagccagaacttacccgcatgccaatgccgaaatcggcgttcgtaccatgaagcaaataaacgccgccataggccgccagacgaatcgcatgatggcccattgggttatccagtccagccggcactaccgcaggcaactcaattccctgtgctttataacgggcgcggatgtttgccgttggcgtccaggttgggtttgcacgtttgtctgaaacggtggtcaccattgtcggtgtcagcgtgtcaccacctaactgaccaatacctattggatacacggttaccgaatttttacccggcgggtagtaatagagacgcagctccgcaatgttgatcacaatgccttcgcgcggcgcatctggaagtagggtttgcaacgggatcgttaacacgctgcccgcgcgcggtacgtaaggatcaacgccggggttagcctgtaacagagcgagaaagccgacgttgtattttttggcgatggcttccagagaaccaccgtcattttccaccacatgaaatttgttttcgccaaccagacgactgcccgctggcggcagcggccaggtgttggcttttgccggtagcgccagcgccacggcagcggcgaacgtaaaaaacgttagccagcgagaaaaacgcgttttgatcatcaccaaaaatccataataaatataaggttattgtaataaacagataagcctgaattatggatggtgacagtgtcggatagtgcagggaagtgcaaagaatttgtaaatgttgcagatgggggcgcagaaacgcccccgatttaccattaagcgatcgcgttctcttccagttcacgcataaactggcgtacccattcgatacgcgttttccgctcactcaaatcctgaataaatttcaggcgcgtcggaccatcaaggcggtaatgctgcggctgtttttgcagcaaaccaatcaaccaggccggattaacgtgattcttctcggcaaattcgatcaccccgcctttctcattaccttccagcttcctgatccccagtttctgcgcttgctggcgcagacgggcaatatccagcagggtacgcgccggatctggcagcaggccgaagcgatcgataagctcgactttgatctcttccagttcgttttccgttttggcgctggcaatacgtttgtagaacgacagacgcgtgttcacgtcagggatgaaatcatctggcaatagcgacggcatccgcagctcgacttctgtttgctggctggtgagatcttccagcgacggctcgcgtccggctttcagtgcatcgacggcgttttccagcaactccatatacagcgagaaaccgatggtttccattgagccgctttgttcttcgccaagcagttcacccgcgccgcgaatctccagatcgtgcgttgccagcgcaaaacctgccccgagatcttccagcgaggcaattgcttcaagacgtttttgtgcatcggtagtcatcgcttttggatgcggtgtcagcaaccatgcatatgcctgatgatgcgaacgtccgacgcgaccgcgtaactggtgcagctgcgccagaccgaagtgatccgcgcgttcaatgataatagtgttggctgtcgggatgtcgatcccggtttcgataatggttgtacaaaccagcacgttgaaacgttgatgatggaaatcattcatcacccgttccagttcgcgctcgcgcatctgcccgtgaccgatggcgatccgcgcttctggcaccagttctgccagccgttcggcggctttctgaatgttttccacatcattgtagagataataaacctgtcctccgcgcaaaatttcacgcaggatcgcctcccggaccaccatgctgtcatactcacggacaaaggttttaactgccagacgacgggcgggcggcgtggcgataatcgacaggtcacgcattccgctcattgccatattcagcgtacgtgggatcggcgttgcagtaagcgtcagaatatccacgttcgcgcgcatcgctttaatgcgctctttatgacgcaccccgaagcggtgttcttcatcgacaatcagcaggcctaaatctttaaacttgacgtcactttgcagcagtttgtgcgtaccgatcagaatatcgattttcccttccgccacttccgcaaggatttgcgtctgctctttggcgctgcggaaacgggagatcatttcgatacgtaccggccagttggcgaaacggtcgcggaagttgtcgtaatgctgctgcgcgagaagggtggtaggcaccagcaccgccacctgcttgtggttatctactgccaggaaagctgcgcgcatcgccacttctgttttaccaaagccaacatcgccgcacaccagacgatccattgccagcggctgacacatgtcgctaagtaccgcattaatggcctgcgcctgatccggcgtggtttcaaacgggaagctgtcgcagaacaactgatactgctcacgatcgtgtttaaacgcgaagccctctttggcggcgcgttgcgcgtagatatccagcaattccgccgccacatcacgcactttttccgccgctttctgccgcgcgcgtgaccacgcatcgccgccaagtttatgcagcggggcgttttcttccgcgccacctgcgtaacggctaatcagatgcagtgacgacaccggaacatacagtttggcgtcgttggcataggtgagcatcagatactcgccagtaatgccacccgcttccagcgtggtcattccggcataacgaccgacgccgtgctccagatggaccaccggctgaccaatatgcagttccgcaaggttacggatcagtgtatcggggttgatggtgcggcgagaatcctgacgacgacgggcaacgcgttcaccgagcagatcgctttcgcaaatcagcgccagattacgcaccgtatcgacaaaaccatgttcggcagcgccaatcatcagataacgcccacggtcgctggcttcatcaagacgcataatgcgttgcggagcaattttaattcgtgcgagcagttcacccagcgcttcacggcgaccttcactttctaccgagaacaccaccggaccgtcgaaagtctcgaggaacttacgcagcgcatccagcggcgctttttgttgtgcctgaacggccaggtctggcagtttctggaaacctaaattggcattcgcggcttttgtcggtaaatgttcagtttttagctgcacccggggccagtttttcagctctgagaagagctcgtccacccgcagccagagcgattgtggtggcaacagcgggcgcatcggatcgacgccgcgattctcaaaacgcgccagcgtgtcagcctggaaacgttcggcactggtttccagatcgccagtattcacgagcaaggtattggcagggaaataactgaacagcggcggcagtggttcgctgaagaacaatggctgccagtactcgatcccggcaggtaatgtgcctttactcacttgctggtaaatatgttctggatcgcgcttcacttcgaaggtatcgcgccactggctgcggaacagttcaattgccgctttatcggtcggaaattcgtgcgcgggcagcagattgatcgcttctacttcctccagcgtgcgctggctgtcgacgtcaaacacccgcaggctgtcgatttcatcatcaaagaaatcaagacgataaggcagctcactccccatcgggaagagatccagcaacgcgccgcgcgtggcgtattcgccgtgctccatcacctggtcaacatggcgataaccggcgctgtccagttgggttcgtaatgcatctcgtgacaggcgctgaccttttttcatcaccagcgcatgaccgtggagaaaactgtgtgggcaaacgcgctgcataagcgtattcaccggaacaatcagtacgccacgctgcatcgtcggtagctggtaaagggtggaaaggcgcgaggagataatgtcctgatgaggcgaaaaactgtcgtagggaagagtttcccagtccgccagattcatcaccatttgatcggtaaactggctgatttcatcatgcaaacgcagagcattttgcatatctggtgcaatgagtaccaccggaccggcgtgacgttcggcaatttccgctaccagcgttgcacaggctgcgccggttaactcgcccagcagacgctgctcacccgctttgacgggcagcgtataacgatattgttcaggcataacggttgtcagattctcgttaggatatgcctcaacatatgggggcatatctctgataagcaatgctgttcattatccgtaatcgacatggtttagcaaattgaatcgccccggctggggcgatggcttagcgggagtaactgacggcagcgggcagtgaaggcggggagaacaacagatcgctgaatgcacgctgtgaaagttttcttaccagcaagcccgcaacagtacagatgaacaaactgacaaagggataaaccagcaggagtgtcagttcgacttgcggcgaccagcgtgctgcgttcatttgcgcaagcagagttaagctgaatatttcaaccagaatgcgatgggtggtgtagatagcaatggtgttggagccaatcacattcagcaggctggtggagcgcataccgaatcgttgctcgtattgataaaacagcttcatgatcaccacaatcgataccagcgacaacagcagcgagatagtaaacaaccaggcaccgaccgccagaacggtaagcaaagaagccatcagcagatggcggcgcaacggcacctctttaacacaggtcattattgttgcgccaaaccatgcgccaaggctgtaataaggcaaattgcggatcacactgttcattccccaccacggcgtgggaacgaaattaaccgccacactcagcagtacaaacaaggcgaatagtggcagcgccagacggctaaaaattttacataccacgaaatagacaattaacgcatacagataccacaagctggtgctggcggtgatcatcccgtgcaggaactcaccggtggaatcggcataagcggcattggaggcattgcttaaatcgcgctcaggtgccagccactggttcagcgcacttaacgccagccactgcaccacgccccaaagcgccagcacccagaagatgttccagatccgtttatcgagacaatttccccacggtacgctgtcgatatagcggcgaatcaaatagccggatataaagaaaaaaaccggcatacgaaagggggcaaggtaaagattgaaatagatccagcatttgctcaggacttccgataacggatgctgaaaagtggtcagatgcggataaaaggtaatgaccgagtgataaatcaccaccagacaaatacataaccctttgatctggttaatccatagctctttttgtttcatcaggacaacacgctcttttttaatttacatgcggttgatcctgcgggttatgacccgaggtgtaatgggtatctgtctgtattggatgatttttcagattaagatcaggcggcaagattgatgataaaacatggcaatttagccgattgatttacgggggcttttcagattagccctgacgatcacttacagttcagacgtttacccatcttgctttcgcttatatactcgtgtctttgctacagcaaccagacggatttcatgtaccaacctgtcgctctatttattggcctgcgttacatgcgtgggcgtgcagcggatcgcttcggtcgtttcgtctcctggctttctaccatcggcattaccctcggggtgatggcgctggtcacagtattgtcagtgatgaacggctttgagcgcgagctgcaaaacaacatccttggcctgatgccacaggcaattctctcttctgagcatggctctcttaacccgcagcaactcccagaaacggcagtcaaactggacggcgttaatcgcgtcgcacctattactaccggtgatgtggtactgcaaagcgcgcgcagcgtggcggtcggggtgatgctcggtatcgacccggcgcaaaaagatccacttacaccgtatctggtcaatgtgaaacaaactgacctcgagccggggaaatataatgtcatcctcggcgaacaacttgcctcacagctaggcgttaatcgcggtgatcaaatccgcgtgatggtaccatctgccagccagttcacgccgatggggcgtattccaagccagcgcctgttcaatgtgattggcactttcgccgccaacagtgaagtcgatggctatgaaatgctggtgaatattgaggatgcctcgcgtctgatgcgttatccggcaggcaatattaccggctggcgtttgtggctggatgagccgctgaaagtcgactcattaagtcagcaaaaactgcctgaaggcagcaaatggcaggactggcgtgatcgtaaaggcgagttgttccaggccgtacgcatggaaaaaaatatgatgggtttactgctgagcctgattgtcgccgttgcggcgtttaacattattacctcactagggctgatggtaatggagaagcagggcgaagtagcgatcctgcaaacgcaaggcttaactccgcgacaaatcatgatggtctttatggtgcaaggggccagcgccgggattatcggtgcgatcctcggagcggcgcttggcgccctgcttgccagccagttaaataatctgatgccgataatcggcgtcctgcttgatggcgcggcgctgccggtggctatcgaacctttacaggtcattgttattgcgctggtggcgatggctatcgcgctgctgtctacgctttacccttcatggcgcgctgccgccactcaacccgctgaggctttacgttatgaataagatcctgttgcaatgcgacaacctgtgcaaacgctatcaggaaggcagtgtgcaaaccgatgtgctgcacaatgtcagtttcagcgtcggcgaaggtgaaatgatggcgatcgtcggtagctctggttccggtaaaagtaccttgctgcacctgctgggcgggctggatacgccaacctccggcgatgtgatttttaatggtcagccaatgagcaaactgtcgtcggcagcgaaagctgaactgcgcaaccagaagctgggctttatttatcagtttcaccacctgctgccggattttaccgccctggaaaacgtggctatgccgctgctgattggcaagaaaaagcccgctgaaatcaacagccgtgcacttgagatgttaaaagcggtggggctggatcatcgtgcgaatcaccgcccatctgaactttctggcggcgaacgccagcgtgtggcgattgcccgtgcgctggtgaataacccgcgcctggtactggcggatgaacctaccggtaacctcgatgcgcgtaacgccgacagcatcttccagttgcttggggaattgaatcgcttgcagggcaccgccttcctggtggttactcacgacctgcaactggcgaaacgtatgagccgccagttagaaatgcgtgatggtcgtctgacggcggaactgagcctgatgggggcggagtaatggcgatgcctttatcgttattaattggcctgcgttttagtcgcggacggcggcgcggcggcatggtgtcgctgatctccgttatttctaccattggcattgccctcggcgtggcggtattgatcgtcggcttaagcgcgatgaacggctttgaacgcgaactgaacaaccgtattctggcggtggtgccgcatggtgaaatcgaggcggtggatcagccgtggactaactggcaggaagcactggatcacgtgcaaaaagtgccgggtattgccgctgccgcgccgtatatcaatttcaccgggctggtggaaagtggcgcgaatcttcgcgcaatccaggtgaagggcgttaacccgcaacaggaacagcgtctgagcgcattaccctcgtttgtccagggcgatgcgtggcgcaattttaaagcgggcgaacagcaaattatcatcggcaaaggcgtggcggatgcgctgaaagtgaagcagggggattgggtgtcgattatgatccccaactcgaatcccgagcataaactgatgcagccaaaacgtgtgcgtttgcacgttgccggtattttgcagttgagtggtcaactcgatcacagttttgccatgatcccgctggcggatgcccaacaatatcttgatatgggttccagcgtgtcaggtattgcccttaaaatgacggatgttttcaacgccaataagctggtacgcgatgcgggtgaagtgaccaacagctatgtttatattaaaagctggattggtacttacggctatatgtatcgcgatatccaaatgatccgcgccattatgtatctggcgatggtactggtgattggcgtggcctgtttcaacatcgtctccaccttagtgatggcggtgaaagacaagagtggcgatatcgcagtattaagaacgctgggggcgaaagatggtttaattcgcgccatctttgtctggtatggattgctggcagggctgttcggcagcctgtgtggtgtgattatcggcgtagtggtttcactgcaacttaccccgattattgagtggattgaaaagttgatcggtcatcagttcctctccagcgatatctattttattgatttcctgccatcggaattgcactggctggacgtcttctacgtactggtcacagcattgttgctgagtcttttggcaagttggtatccggcgcggcgcgccagtaatattgaccctgcgcgagtccttagcggccagtaaaggcagtacattaaaacaaggagcggcaatgtattacgggtttgatattggtggaacaaaaattgcgcttggcgtgtttgatagcggtcggcagttgcagtgggaaaagcgggtgccgacaccgcgtgacagctatgacgcatttttagatgcagtgtgtgagctggtagctgaagctgaccaacgttttggctgtaaaggttctgtcggcatcggtattccgggaatgccggaaacagaagatggtacgctgtatgccgccaatgtccccgctgccagcggtaaaccgctgcgtgccgacctgagcgcacgtcttgatcgcgatgtacgccttgataacgatgccaactgttttgccctttcagaagcctgggatgatgaatttactcaatatccactggtgatggggttgattctcggcaccggtgttggcggcgggctgattttcaacggcaaaccgattaccggtaaaagctacattaccggcgagtttggccatatgcgtctgccggttgatgcgttaaccatgatggggttggatttcccgttacgccgctgcggctgtggtcagcatggctgcattgaaaattatctgtctggtcgcggttttgcgtggctgtatcaacactattatcatcaaccgttgcaggctcccgaaattattgcgctttatgatcaaggcgatgagcaggcaagggcgcacgttgagcgttatctggatttattagcggtttgtctgggaaatatcctgaccatcgttgaccctgacctggtcgtcattggtggtggcttatcgaatttcccggcaatcacaacgcaactggcggacaggctgcctcgtcatctcttacctgtagctcgtgttccgcgcattgaacgcgcgcgccacggtgatgcgggaggaatgcgtggtgcggccttcctacatctaaccgattaaacaacagaggttgctatgctgtcgcgtcggggtcatcggttaagtcgttttcgtaaaaataaacgccgcctgcgcgagcgtttgcgtcagcgtatttttttcagagataaagtggtgccggaagcaatggaaaaaccaagagtactcgtactgacaggggcaggaatttctgcggaatcaggtattcgtacctttcgcgccgcagatggcctgtgggaagaacatcgggttgaagatgtggcaacgccggaaggtttcgatcgcgatcctgaactggtgcaagcgttttataacgcccgtcgtcgacagctgcagcagccagaaattcagcctaacgccgcgcatcttgcgctggctaaactgcaagacgccctcggcgatcgctttttgctggtgacgcagaatatcgacaacctgcatgaacgcgcaggtaataccaatgtgattcatatgcatggggaactgctgaaagtgcgttgttcacaaagtggtcaggttctcgactggacaggagacgttaccccagaagataaatgccattgttgccagtttccggcacccttgcgcccgcacgtagtgtggtttggcgaaatgccactcggcatggatgaaatttatatggcgttgtcgatggccgatattttcattgccattggcacatccgggcatgtttatccggcggctgggtttgttcacgaagcgaaactgcatggcgcgcacaccgtggaactgaatcttgaaccgagtcaggttggtaatgaatttgccgagaaatattacggcccggcaagccaggtggtgcctgagtttgttgaaaagttgctgaagggattaaaagcgggaagcattgcctgatgcactacgcttatcaggcctgcaaggggacgcaattaattgaatttgcgggttttgtgggccggataaggcgttcgcgccccatccggaataatacacgcgcacttttccggcctcttttatcgtttactcgtcaataacaatgcggcaataaacgtacagacaccaattagccctgcccagagtggcgatattctggtaatcgcaaagctattatcgatatacaaacataaagcctgataacccatattggcaatagtcatcgccactgcaaattttaacgcataaataaaacgagtcgtgtagtaaaagatcctggaaaataagataaacgtcgcagcccaggcgataaaacctaatgtgttggtgctgccggggggagcattttcatgctgttgtcctggatgcggataatacgttagtggcggcgtcgattgttttaatatctgtgcttgtagaacagccaatgcattattgattccctgataccagagatctgcatttaaataagccagcgtgtgattttctatcagaaggccgagatgtttatcgtccagaccactttcaacctggccgttggtgatcataattaaccgtggttcgcgggtagtaaatagtaacagaacacttccttttacatcactcaatgaagatgacgcatgcgccagcatcgctttaccattttgtctgagactggcttcattattaatgtcgggtaaaaccacaataaacggtgcaattcccgtttgttggcgaaaaagctcggctttatgcgcgatctcttcagcatctggtacagtaccggtaacgtccgtaaaaagtgtcttcattattggaattaatggcttgctggctgctgtcagaggcaggagtatcagtaaactgagcagtataatgaattttttcatgggcgggacttccgtttcctgcgtgattttttagaggagggcatacttattaataaaccgacggcgataaaaataacgcccataatgccgataaacccccatttaaaaaaattaacccacgggttatttatctcagccttttcaggatgcccgggagaataataaacattaactttatcgccttcgctgtcttcataaaaatcgctgccgatactcgaattgaaaattagcgtgtaatctggcgtcggtcgaaaggcaacgacgggataccacgaaccatctttacccgtgcgatgagaatgactggagtgccagacggtatcaacaatgacgccttcggtatgaatcgcgtctttgctataggtgaactggttataaaagacaacaacagaaatgaggatcagtaccagaccgataccgaggaatatacgaaagaaaactttactgtcctgactcattagccacatccttgctaactaaaaaacgggcggtaataccaccgcccgcttgctgaattaacgtcctgctttcagcttctgataatactcttcataaatgctgctggctgcgccaacgtcattctgccattcgccatttttaatggtttcagcatccgggtagagtgttttatcgttcgccacttctggacttaacagcttacgcgccgcaaggtttggcgttggataaccgatagtttcagcaacctgttttgccacatccgggcgcagcaggaagttgatcaatttcagcgcgccttctttgtttttggcatttgccgggatcgccaggctgtccatccagaaaatgccgccttctttcggccacaccacgtcaattggcgtacccgcctggcgtgcaacgaaagcagaaccgttccagatcatgccgaggttaacttcgccttccatgtacgggttcgccgggttatcggagttaaaggctgccacgtttggcatcagttttttcagctcgttatatgcagcttcaatctctttcggatcggtggtgttaccggagtagcccagcttacgcagcgccatctggaacacttcacgggcatcgtcggtcaacagcaggctgcctttgtactctggcttccacagatcggcccagctggtgacagatttcggatccaccgcatcaccgttaacaccaatcgccgtcgcaccccagatatacggaatggagtagtcgttattcgggtcaaaaggcttgttgagcatgtctggatcgagattgctgaagtttgttaacttcgacttgtcgatcttctggatcatcccttctttacgcattttatcaacgtaataggttgaaggaaccaccagatcataggcaccgtctttgtatgttttcagcttggcgtacatggtttcgttcgactcgtaagtcgaatagataaccttaataccggtttctttggtgaactgttcaagcagtcctggcggcacgtactcggtccagttgtagaaatacagcgtgttgttgtcatcggcgtgagcggcgctcatgcccagtgccagagcacccgccgcgagcaggtggcgtgaccattttttcatttaacgtcccctgtgttacctttcgttttatcacgagcaataagctggctggcaataaccatcaccagcgacagcaccagtaatatggttgccagcgcgttaacttccggcgatacgccgactttgaccatcgaataaatttttaacggcagaatttcataacttggtccggtgacgaacgaagaaactaccacatcgtccatcgacagggtaaagcttaacacccagcccgccgccaccgctggcattgccagtggcagaatgatttttcgcagaatggtaaattcgctggcaccgagatctttcgccgcttccagcattcgcacgtcaaaacctttcaggcgcgaatacaccgtcaccaccacaaatggcaggcagaaggtgatatgcgagaacagcagcgaccagaagccaagctgaatacccagcagcataaacagcaccagcagcgaaatcgccatcacgatatctggtgacatcatcaccacaaacagcattccgctaacgaacggcttaccacgaaagcgataacggtacagcgcaactgccgtcagtgaaccgataagcgtagcaaacgtcgccgaaaacaccgccattgttagtgaatgctgcgctgcctgtaacaggctgtcgttgttcatcagcaggctataccatttggtggtaaagccctgccagttgatgccaaagcgcgagctgttaaaggagttcacaatcaaaataatgattgggatatacaggtacgcgtagatagcggtcataaaaccgccgcgaagcagtcgaccgatcattcgagttccaccttcttattcagcaaacgagaagcgcgccagtaaaccagcaacatcaggcccattacgatagtcagcgtaatgctggtagctgcaccaaacggccagtcacgaatattaaggaactggaccttgatgacgttaccgatcagcaggtttttcgcaccgcccatcaggtcggatacatagaacaggcccatcgctggcagcatcaccagcagacatccggcaataattcccggcatcgtcagtggaataatgatacggataaaagtctgtaacttgctggcaccgagatcgcgcgccgcctcaagcaacggcttatccagtttttcgatactggagtacagcggcatcaccataaacggcagcagaatgtaaaccagaccgataatcaccgcactgggcgtgaacatgatacggattggtgtgtcgataacgcccagccagagcaaaaactcgttgagatagcctttggtgctgaggaaaattttcagcccgtagatacgaattaatgagttggtccagaacggaacaatcagcagaaacagcagcagcggacgcaccttgtgtggcaacttcgccagaaaccaggcaaacgggtagcccagcaccaggcaggcgagggtggcgatcagcgccatattcagcgagtgcaatagcacttcaaaatagagcggatcgagcagacgcgtgtagttatccagcgtaaagaccattttgacaaaactggcgtcgtcgcgggtcaaaaagctggtgccaatgatcatcaggttgggcagaaagacaaacaacacaagccaaccgacaatagtgacaatcactacattctggaacttacttgtgttcttcatcagccagtacgacctcccagctttctacccaattaatggccattttttggtcgagagagtggtcaaagtcaggatcgtcttcattgaagaattcgctgaccatcaccatcttgccattttccagttcaacaaccgactccagcgtcatgcctttgtagttacgctcgcgaacgtaaccaatcagcccttcagcgtggttgtcgtcgttaatctcttcaacacgtaagtcttccgggcgcagcagaacatgcagtttttgccccggttcaacggcgaagttaacgtagatattacattcgcggccttcaacgttggcgcgtacgcgctgctcgtctagacgttcgatgacagtggcgttaaacatattgatttcgccaatgaagccggcaacaaacaggtttttcggctcttcgtagatttcacgcggcgtgccgtcttgctcaatgcgaccatcgcgcatcaccacaatcctgtctgacatggtgagtgcttcttcctggtcgtgagtcacaaagacgaatgtaatgccaagcttacgctgtaacgctttcagctcgttctgcatttgcttacgcagtttgtaatccagcgctgagagcgactcatccagcaacaacagacgaggcttgttaaccaccgcgcgagcaatggcgacgcgttgctgttgaccaccagagagctgatgcggtttgcgttgagcgaaggtttccaactgcaccatccgcagggcttccatcacgcggggcgtaatttcagcagcgggggttttttgcatgcgcaacccaaaggccacattttcgaacacggtcatgtgggggaaaagtgcgtagctttggaaaacagtgttcacatagcggttttccgccggaacgtgggtgatgtcctcgttatccagcatgatgcgtccggaatcaacagtttccagacctgcaatcaggcgaagaacggttgttttaccgcagccagaagggccaagcagcgtgaggaactcgccattgttgatagtcagatccagctggggaatgacctctttaccatcaaagcatttgcgaattcccgccaattgcaccagcggtgaaagcgaactcggttgtttattcaattttttactctgtcccatgtaaacgcaacggatggcttaccgatgcggggtttgtggttaaccaccttggtgactcttaatgagggcggtaattctacggcaaaccgcttgaatcgccaatctttgttgtgaattactggcttagctttatattcattaaggtaatgctgataaatattcccgcttgcaggggtaaaagtgacctgacgcaatatttgtcttttcttgcttcttaataatgttgtcacaaaaagtgagggtgactacatggataaactacttgagcgatttttgaactacgtgtctctggatacccaatcaaaagcaggggtgagacaggttcccagcacggaaggccaatggaagttattgcatctgctgaaagagcagctcgaagagatggggcttatcaatgtgaccttaagtgagaagggcactttgatggcgacgttaccggctaacgtccctggcgatatcccggcgattggctttatttctcatgtggatacctcaccggattgcagcggcaaaaatgtgaatccgcaaattgttgaaaactatcgcggtggcgatattgcgctgggtatcggcgatgaagttttatcaccggttatgttcccggtgctgcatcagctactgggtcagacgctgattaccaccgatggtaaaaccttgttaggtgccgatgacaaagcaggtattgcagaaatcatgaccgcgctggcggtattgcaacagaaaaaaattccgcatggtgatattcgcgtcgcctttaccccggatgaagaagtgggcaaaggggcgaaacattttgatgttgacgccttcgatgcccgctgggcttacactgttgatggtggtggcgtaggcgaactggagtttgaaaacttcaacgccgcgtcggtcaatatcaaaattgtcggtaacaatgttcatccgggcacggcgaaaggagtgatggtaaatgcgctgtcgctggcggcacgtattcatgcggaagttccggcggatgaaagcccggaaatgacagaaggctatgaaggtttctatcatctggcgagcatgaaaggcaccgttgaacgggccgatatgcactacatcatccgtgatttcgaccgtaaacagtttgaagcgcgtaaacgtaaaatgatggagatcgccaaaaaagtgggcaaagggttacatcctgattgctacattgaactggtgattgaagacagttactacaatatgcgcgagaaagtggttgagcatccgcatattctcgatatcgcccagcaggcgatgcgcgattgcgatattgaaccggaactgaaaccgatccgcggtggtaccgacggcgcgcagttgtcgtttatgggattaccgtgcccgaacctgttcactggcggttacaactatcatggtaagcatgagtttgtgactctggaaggtatggaaaaagcggtgcaggtgatcgtccgtattgccgagttaacggcgcaacggaagtaagcgaaaagggatgcggcatgtgatgccgcatccggcttaaatccaaacttacccttcgaagaaccaatacccgctattgaccagcgccgcgagcatcgcgaggaatgacggatcttccagcgcatcgccaaaattctccgcagtcagcgcaatgttgctggcgagtgcatccagtgccggacggtgcggggaatcgatcttctcaccattggcatacacgtcgtcgccaatgcgcaatacgcgcagaccacccaggcgcaccagcacttcaccttgtttcagcgcatcgtagatttcatccggctgataaggcggctctggcggcgcgatatccagttcatgacgtgactgggatataaactcgccaaaccattgcttaaagtgttccggctggttgatcaattcgagcatcatctcacgcagtttatccatctcttgcggcagaacatccgcaggatgagcgcgaggtggaacatccggatcgctgtagtagttgccgcccagttcacgttgcagcacataatcggcaaatccactaatcagttcccgcgtatttggcgcgcgaaagcccacggaatagttcatcgcattttccagcgcgtagccttcatgcgggaatcctggcggaatataaagaatatcaccaggctccagctcttcatcgatgatggcttcgaacggatcgacctgtaacagatccggatgtgggcagtgctgtttcatttgcagcttttcgcccactcgccagcgacgacgtccggtaccctgaatgataaacacgtcgtactgatcgagatgcgggccgacgccgccgccgggtacagaaaaagaaatcatcagatcatcaatacgccagtccggtagttcacggaacggtcgcatcagcgcggcggtcggctcatgccagtggttcactgcctgtaccagtaatgaccagttggtttcaccgagatgatcgtagctttcgaacgggccgtggctgacctgccatttgccatcctggtgactgaccagtcgactgtcaacttcgctttccatcgccagacccgccaactcgtctggagagatcgggtcaataaaattattaaagccgcgttttaacaccaccgggcgtttctgccagtgacgttcaagaaaatcgggccagttaagagtgagttggtattccatgttaagcatccacaggctggtatctgcaaccgattataacggatgcttaacgtaatgcgtgaagtatgggcatatttattcatctttcggcgcagaatgctggcgaccaaaaatcacctccatccgcgcaccgcccagcatgctctctccggcgacgattttaccctcatattgctcggtgatttcgcgggctaccgccagccctacaccttgcccagggcgtaaagtatcaacccgttgaccacggtcgaaaatgacctctcgcttgcttaatggaataccggggccatcatcctcgaccacaatatagagatgctcgtcggtttgccttgcagaaatttcgacaaactcgaggcaatatttacaggcattatccagcacgttgcccatcacctcgacaaaatcgttctgctcaccgacaaagctgatctctggcgaaatatcgagagagatattgacccctttgcgttgatacactttgttcagcgctgaggtgagattgtccagcagtggggcgaccggatgcagctcgcggctgagcaatgtcccgccgcgcatactggcacgatgcaggtagtagccaatttgctgtgaaatgcggctgatttgctccagcattaccggctcagcatcactgacgctcatcttttcactacgcagagaacgcagcgtactttgcagcaccgccagtggcgttttcagactatgggtcaggtcggtgagcgtcgtacggtatttgtcgtaacgttcgcgttcactttttaacaatcggttcaggtttcgtaccagactggtcagttctcgcgttgtggctggattgagcaattcgcggttatgttcttccagttcgcggacttcttttgccagggcttcgatggggcgtaaactccaccaggcggcgacccacagcagcgggatcactaacagcagattggctgagagcacatagataaaccagctccagaccatataggaactttttagctccaccggaatggtatccaccaccacaatggttaattttggcatccgcgatgttgccgggtagacgtttactgccaccgagtgggtcatctccgcgtcgtcatcatcttcccgcacttcctgcaactgttgctgtatcgaatgatctccactcagcaagaggctggtatcgttaacatccgcttcaatttcatgaaaaccattcgatttcagccagtcaggctggatcatcttcatcagccagggcacgtcacgttgcgcccataaaagctgcccgttctcatcataaattagcgtcatggtggggctttgcttgtcgatattttcgggtaactcgacatgcaacttattgttttcccacttcgcaagggtatagaacagattgctctcgccacgtaacagccgaaacgtagttttatcgaaactgacgctataaccgatcagcgcgaccattccgtaggcaagcgaaagcaccagtactaccgctgccgttgccaacagaaaacgtacccgcagcgagagcgggaaaaaaagacgcagtaattttttcatcagcgcaattcgaacagatagccctggccgcgaacggtggtaatcacttcttggggatattgtgcctgaatttttttgcgcagacgtcccatcagtacatcaatggtatggctttcccgcagctccgcatccggatagagttggagcattaacgaatctttgctgaccactttgccattattgcgtatcaacgtttccataatagtgtattcgaacgcggtcagtttgatcacttcgtcattaatagataattcacggcgagagagatcaacctgaaacggggggagcgaaatgacctgtgaagccagaccgctattacgccgcattaatgcctgcattcgcgccatcacctcttcaatatgaaacggtttagtcacataatcatcagcaccggcacttaatacttcgactttgtcctgccagctttcacgggcggttaataccagaatcggcagtgaaacatcgttgctacgccagcggcgaatcagtgacagaccgtcctcgtctggcaatccgagatcgacaatcgcaatatccggtatatgttcattgagataataatcggcttctttggcatcttctgcgtcatcgacctgatgaccagcatcctgaatctgaactttaaggtggtgacgtaacaacgcattgtcttcaacaaccagtacgcgcatttttatttctccctgtcttaattattaaaatagtgtaacgcgattatgtggttatgggggtaaacattaaataaaccagcggggaggggaggtaaagtgaaaaaataaaaagcggataatcttaataagcaggccggacagcatcgccatccggcactgatacgaggtttatttcagctcatcaaccatcgtgatagctcgaccaatatagttagccggcgtcatcgctttcaggcgggctttctcttcttctggcaacgccagaccatcgataaactgcttcatgccttcggcgtcaacgcgcttaccgcgagtcagctctttcagcttctcgtacggtttttcgatgccatagcgacgcataactgtctggattggttcagccagcacttcccagttgtgatccagttcatccagcagatggtcacggttcacttccagtttgctcacgcctttcagggtggattgatatgcaatcaaggcataaccgatacccacgccgaggttacgcagcacggtagagtcggtcaggtcacgctgccagcgggaaaccggcagtttgcttgccagatgctgcaataccgcgttggaaaggcccagattcccttcggagttttcgaagtcgatcgggttaactttatgcggcatggtggaagaaccaatctcaccagcaatggttttctgtttgaagtggttaagggcgatataaccccagacgtcacggtcaaagtcgatcagaatagtgttgaagcgcgcaacgcaatcaaacagttcggcaatgtagtcgtgcggttcgatctgggtggtgtacgggttccactgaatacccagcgaggtgacgaactcttcgctgaactgatgccagtcaacttccgggtaagcggcgatgtgggcgttatagttaccgaccgcgccgttgattttgccgaggatctccacctggttaagctggcggtactggcgctccatacggtaggcgacgtttgccatctctttaccgatggttgacggcgtggctggctgaccgtgggtacgagacagcagcgggatatcgcgatactgaacggcgagatctttaatgccatcaatcagttgacgccagtatggcaggatcacttcatcacgcgcggttttcagcattaatgcgtgggagaggttattgatatcttccgaagtacaggcaaagtggatgaattcagaaaccgcgtgcagttccgggatctccgccactttttctttcaggaaatactcaaccgctttaacgtcgtggttagtggtacgctcgatagttttgatgcgcgccgcatcttcttcgctgaaactggcgacgattgcatcaaggtaaccgattgcgtcggcagcaaaagcaggaacttccttgatcgctgcgtgcgcggccagtttttgcagccaacgtacttcaacttgtacacggaatttcagcaaaccatattcgctgaaaatcccgcgcagcgcgctgactttatcgccgtagcgtccatcgacaggggaaacggcggtcagtgaggataattccatagatcacaactccggggttaaatgagcaagaatttgttttgcctgagtggtcaggcgattacgagaaaacatcagttgcagacgtccgccgccgacctggtgccagagcacggcggcgcgaatgcctgccagcagggttgcgcgaactttcgcctgcacttgtgggctttgcagtacagcaggggaaccggtgacctgaatgcgcgggccaagcgggctaatcacatcaacatagatagcagccatcgcgctcatcagcgtttcggactgtaaatcgaagtgttcgagctggcgttgcaggccgttgatccggttgcccagagtgtcgagcgcgcctttcgctgaggagagtttgcgctcaagcaccatcaagctgagtgtgtagcgggttaattcggcgtttaagccctggcgactgctggcattgagcacgccgagcagggtttccagcccgacgcgcaggttggcttcgctaccgccaaaaaccgccagcgtcgagctggggttcatatcaataatactgttgagtgagacgtgtagcgcatcggcatcacaatgcccctggtgagcgagttgttgcaccaggcgtgccgactgacaaataccggccagggcgagggtgatgtcatagtaattctttgccacgttcactgcttccttgttttaagtaaagataataatcagaccggcagcggcagacgctgctcaataataccgccaccgaggcacacttcaccgttatagaagacggcagactggcccggcgtcacggcggcaaccggttcatcgaaaatcacttcaatgcgatcatcgtccagcgccttgacggtgcaagggatatcggtctggcgatagcgggtttttaccgtgcaacgcatagtgccggtgaatggttcgcgatcgacccagtgcaactgctgggcaatcaacccgacagacatcagccgcgggtgttcatggccctgagcgacaaccagaatgttgttttcgacgtctttgtccaccacataccacggttcttcggtaccttctttggtgccaccgatacccagacctttacgctgaccgagagtgtgatacatcagcccctggtgctcaccaatttcatcgccatcgacggtaatgattttgcccggttgcgccgggagataacggcccaggaactcgcggaatttacgttcgccaatgaagcaaatgccggtagagtcttttttcttcgcggtgaccagaccaagatcttcagcaatcttacgcacctgcggtttttccagttcgccgaccgggaacaggctttgcgcaatctgctcatggctgagcgtataaaggaagtagctctggtctttattgctgtccagaccacgcagcaggcggctcttgccatcgacatcggcccgacgtacgtaatgaccggtagcgatataatcggcacctaaatcttcggcggcaaattcgaggaaggctttaaatttgatctctttgttgcacagaatatccggattcggcgtgcgaccggctttatattcggcaaggaacagttcgaagacgttgtcccagtactcggcagcaaagttaacggtgtgcagttcaatgccgagcttgtcgcagacagcctgggcatcagccagatccgctgccgctgtgcaatattcctcaccgtcgtcttcttcccagttcttcataaacaggccttcgacctgatatccctgttgttgcaacagccaggcagaaacggaggaatcgacaccgccggacatgccgacgattactttttttgcggtttcagacattggatcactcacgacattgaacttcaaggcggcgtattctatcacgcagccttttagatgacaccctttgtaaaaggccagttaaaatcgccaatcatctccagcggataacgttgcccgctttgataacaacgaatactttccgccaccagcggcgaacgaagatttgacgcctgtaaaatttcttcggcgctgacccaacggcagcagtcgatatcgctgtcatgaggctgggtcgggcatatttgctcaagctcaatggcaaagaggaaacgcaaaaacggcgttttatctggcgcaatccactgatgcatacgaataaagtgttgcggctgcgcgctgatgccggtttcttcccacagttcacgggcggcggcttccactaaggtttcatcggcttccagatgcccggcaggttggttccataacgctttaccattaatcgtctcttcaacgactaaaaatttgccttctgcgtgcaccacgcaagcaacggtaacgtgcggtttaaacattttgcatccttaatctgtcacttctcgccattcaccattggcaagattatccaaagagtaatcacccatcgcatagcgaatcagtcgcagcgtggggaagccaacatgggcggtcatgcggcgcacctggcgattacgtccttcatataaggtgatcttcagccagctggtgggaatacttttgcgttcacgaattggtggattccgcggccataaccacgcgggttcgtcaaccagctccgcgccggcgggcagggtagggccatcatttaaggttacgccattgcgcaaggcttcaagtgcgtcttgtgtgggaataccttccacctgcacataatagatttttccggtgcgtttacccggctgggttaaacgcgcctgcaacgcgccgttattggtcagcaccagcaacccttcgctatcgcggtcaaggcgacctgctgcataaacaccctgaaccgggatgaattcttttaatgttttgcgtccggcttcatcggtgaactgcggaagaacatcgtagggtttattgaacaggatcacacgcgtgggctggttttcaggtttacgcctggtagaacgttgcgagctgaatcgcttaacctggtgatttctaaaagaagttttttgcatggtattttcagagattatgaattgccgcattatagcctaataacgcgcatctttcatgacggcaaacaatagggtagtattgacaagccaattacaaatcattaacaaaaaattgctctaaagcatccgtatcgcaggacgcaaacgcatatgcaacgtggtggcagacgagcaaaccagtagcgctcgaaggagaggtgaatggaaagtaaagtagttgttccggcacaaggcaagaagatcaccctgcaaaacggcaaactcaacgttcctgaaaatccgattatcccttacattgaaggtgatggaatcggtgtagatgtaaccccagccatgctgaaagtggtcgacgctgcagtcgagaaagcctataaaggcgagcgtaaaatctcctggatggaaatttacaccggtgaaaaatccacacaggtttatggtcaggacgtctggctgcctgctgaaactcttgatctgattcgtgaatatcgcgttgccattaaaggtccgctgaccactccggttggtggcggtattcgctctctgaacgttgccctgcgccaggaactggatctctacatctgcctgcgtccggtacgttactatcagggcactccaagcccggttaaacaccctgaactgaccgatatggttatcttccgtgaaaactcggaagacatttatgcgggtatcgaatggaaagcagactctgccgacgccgagaaagtgattaaattcctgcgtgaagagatgggggtgaagaaaattcgcttcccggaacattgtggtatcggtattaagccgtgttcggaagaaggcaccaaacgtctggttcgtgcagcgatcgaatacgcaattgctaacgatcgtgactctgtgactctggtgcacaaaggcaacatcatgaagttcaccgaaggagcgtttaaagactggggctaccagctggcgcgtgaagagtttggcggtgaactgatcgacggtggcccgtggctgaaagttaaaaacccgaacactggcaaagagatcgtcattaaagacgtgattgctgatgcattcctgcaacagatcctgctgcgtccggctgaatatgatgttatcgcctgtatgaacctgaacggtgactacatttctgacgccctggcagcgcaggttggcggtatcggtatcgcccctggtgcaaacatcggtgacgaatgcgccctgtttgaagccacccacggtactgcgccgaaatatgccggtcaggacaaagtaaatcctggctctattattctctccgctgagatgatgctgcgccacatgggttggaccgaagcggctgacttaattgttaaaggtatggaaggcgcaatcaacgcgaaaaccgtaacctatgacttcgagcgtctgatggatggcgctaaactgctgaaatgttcagagtttggtgacgcgatcatcgaaaacatgtaatgccgtagtttgttaaatttattaacgggagcgtaacgctcccgttgttttttgttaggctgctaacggttatcaaaattttatcaaaaaaagttatcaaaacccctcggtagttttggggtaggctggccggtcaggtggtagttctactactagtctcccacatagatattccttagctttttattattgctggcggacgctcgttaatatttaaggtcttcattgattaagacatccccaaagttagttatgtattcactgttattaggacaattatgaattaccactccttacacccgctcaaatattgttaaattgccggttttgtatcaactactcacccgggactcgccaggggacagccaacaggcattgggtgcaatcaccttagcgttcaggtacatgcggaatgtaaaaaaggccgcgagcgcggccccttcacatacatctttagtactgagactgtttaacctagggaattattatcgtattatattgcattacaactcccaacagtgacatatgaacttcctgctttactccacgactttaatatttcaaggccatgtgaagaacatatttcttgcactgcgagttcatcgagtaatccatagtaagaaacactttttgaatttttgtaaatgtatccgtaaagatgttttcttcctgtttcgtattttttgaagtatgagcttttatattgatttacaataagagtctcacctcctgattttagtaatctcttgatgctaagaactattttgtcgattgtatcccgacaaggaacggcagagagaacattagagcaaaggatgaaatcgtaacccccaattattttgtcgacatcctcgaaagcaactgtatttgcatttttataatatcgtgggacatagtcaataattttagttttaattcctctaataatttgctctctttcaagttgccttttcgagtctagaaaagtaacttcatcaaatttactgattaattcatcagaatatctaagttttccgcagccaaaatcaagggcgtggccatttttctcaatgcttctaatatactcgcaaagatatctagagggcatcgtatgaggttttgctgcattctctgagcgaatattaactccgtgcatattatagttcaaagcaagtaccattcaattaatgttatttttagtgaaaaattcttttattttatcgtccgggatttttccgacttgactttcagttctgggcttaactgtcaaagcaaagataataccactcactgagaatgataaaattacaaaaaagaataaagacagcaaagaaccttcaacatgaaaaatatccatttgtttgcaaaaaaagattattaggaaggaaattaatgcaattatcgaaaattcaaaaaatatccaaaaatagtatactttattccagaagagttcaatataatgtttgtcttcaatttttcttacttcagggtaatatagattgctcattacattgtgagcttcatctttatttaattttctgttgactccagctctccgtgataacggttttataattagatgcttatcccaaagatatcgcacccgaagtagtttggctgcattgttatgtaggtctaacgcaccgctaattaaatatgcaaaaatcgcaaaagcacaaggtaatataccaaaagatagtgcccaattaataaagctctcatgatctttaataggtgggacatacttggttggtaatgttattaaagggatgtattcgtaaataactagaagtatgcaatatattagcgtatttaagaaagttgctttatgaagtttaggcaacatttcattataatttttggggggttcgaacatattattcacctgagtcacgctttaggatagtgtaatggtaatatttaattaagtgtcattatatacttttcagtaggttagttacaattttttgtatctgttcaggctgacctagcttcgctgacagacaatattgtgatcagtagcacgtatcgaggaggagtagcgctacaaatttgacgctgggtgagaatctgaaattgatagaaatgaaataatgaaataatgaaatgatgaaatgatgaaatgatgaaatgatgaaatgatgaaatgatgacagagtgtccagtgggcacggatggtgtcttacgacatgcttaccttaatcgttcccagtgtgcctatagcagatattctaaacatgtcgataattcattacgcatatagtatcgaacatagaaaaaactgaagattcatcttattttgtatatactacctagcccaacaatgtagaggttaacgaaaaatgcgctcaccaatttgtcatcttttctcagcaattaattcatcaccatttaagattgcaccagagaaggagcaagatcttaaaacgatagttgacgacaaaaaaattataatttcagttgtgagtgaacctggttttaatatccgagtcaggaagaatgagagtaataattcacatgaaatagttctaacagtagcttcacttgaatatatttgggcattttccaatttcttttgggtttttacgcaagagtactccaaatctcagaaaaataatgatgagcactttgatttaacaggaaaaaataggcttaaaaagtctgatgaacttcttaaatgggcaaggaaaaacttgcaaacaacaggttgcgaatcatggcctaaaaaatgtcccaagccagaagcatatttacaaggaagcgaagactcacaagttgctagcgagatatttctttgtgctattgcttggattcttcatcatgaaataagtcatgttgttttacagcatccattggtcactacagcattctccactcaagaggagcgtgaagcagattcacatgctacaaaatggatattaggcaacctgtatgaatccgctcctgaattaaagaaacgtgcacttggcattgctacggcagtgctttgtatacaaagcttagaagttgaaaattacttctgtttacaaaatacacacccagctgcatatgagcgtatatattcgaatatttcatgctaccctgtcggaaatgaagagttgattgaagctctatgtacagtgatgcttcaatatcttttccatggcaaaaatatcaatgtgaatctagatggggagtccttttcatcgattttaggtgatcttctctgtgatatttcacgtcttaccagtaactgatatggctgtccgccgctcgcttaaagtggactttttagtttttatcatgtgcggtgagaaattcaatgtggcgttgagatgcttaaaggttcacaacgctactttgctccatcctttacctcgatcatcatgataacgatcggtttgttgttgtgttttatgaccaagtagtttttgtgtgtctaacccctgttctttatacagacgttcagataaagacctttgctcatggaatgtcgcaggtgaaccctctccccagtcaattcttgctaaatctctcgctttactaaaattcatcgtcaatgtattggctttaacctgcgctccgcgctctgcttgtgaagttgaacgaaaaaaatgcactaagtatgcactgactgcatagtcacggcagcgggctactacatcgcgtaaactccagttaatcgcattgaggcgaagagaaagaggaattgcgattttgctcccggtcttttcctgaatgacatgaagatgatcatcccaaatatcgctaaatttcatacgcgaaatatcacctaaccgctgaccagtaaccagcgctaacagcatggcatttcccatgtaacgatgagtagcgtctgcgatatcgaagatttttttccattcttcaaggctcagccgttgtcgggtaatttttcttcttggttgtttagtggctaatgctgggttatagccaggaggtacttctccgtagtgctgcgcctctttgaaaacatcaatcaggacggagcgaactacttgtgccattcttggccgcccagcggcgatatactcatcaagcaattgtgctatatctctgacatcaacggctgagatcaacttcattcctgctcgttctctgagcaaggatactggtttagctttttgtttataggtgttgagtcttatatcaccacttttaagcctgtcatcctggatcgcttgatagcgatctaaccaggttgacgttgtgatagcctttcctttgctggttgcgatcctgtcactgatagccagaatctgccgggttctttgttcagccaggcgagtgttggcctcagtggcaatagcgatagcttcagcttcgtttgttcccaaagcatggaattttcctgtcactggatgcttataccgccaatagactttatttaccttcctactataaagcggatataagttagggactgaaacattattcttacgcggtctggctgccattactcaaaatccgttgcaaaagtaatgagtcatttttcttgattacaggtgttaccaactccccaactaactcggcgtcctcacgcactcgccataaccggccttgtttcatggccggtggacaaaataaattctgcttagcataacgacgcaatgtggacacacttggaggattacttctgtatttttcagcagcccattcttcaagagttaacatttgaagcatatgcgatcaccttattactacactaactgcttagtctcagcatatcgaccctgcacggtcggttagtttctccacaaaacagagaagagcacctgtggccacagctatcaggatgggtcgggttattaacccgtcatccggggatactcttctctgttttgtaaaaagggcggtaccagaaaggactaaggaaaaaactggtaccgccaagactacacacagcataaagttgtggtgtcgggtgcccccggtgcctggcgaaggttgcacaccaggcgggtgggtatccacagaaggtcgattgtcagcctcaaccttaacccgcgtgcgctgagccgcattcaccacaacgctaaggattctctctggttgaaaatacttagctgttatgtgcctgtcttttcaccacttcaggctcggtggtatgctggagttctcacacagccagcaagcaaggaaacttaatgaaccagttttatgttcacgttcgtctatttgaagacacagccgaacagaccaaaaaatttgaagaattaatgcttaactttctgtaccagaaaacagttaaagagtctgacgatagctgctgcagactgattccagagggatatatcctcaaaagtacaatgaactgccaacaaatccttgatcaaacattttcaattgctaacagtgccggtgttgacgcaaatatatttgtctgtaaatttgaacaaagcgcatgcttacttccgtctgcttccttagttggtaacgatttcgttcattacgatcttacgcctaagcccatcaagctcgattcttaaagccttaaccattgtgtcgtgataaacacggctcaccttctctccattgcatggcagaggggtgagtgtgttagccatgaaattcatgaactcggttcgaccaggggcttgcgccccgcaagtctttaatgcctgttttgctaacaaaatgcgggcctcagtgcctgcatttggctctatctgctgcaaacgtttagcgtcttccagcaacaatgcgatcacatgcttcaaattctgctcattcatctattctctccactgaaatcatccgctaacgaatcatcccggtcttcgtacgtaccgggcgggctacttcgtgggcgtcctgcctgtttgttgtttctcttgggtacattatgtatctcaaaggtacattgtcaagtataaaaaaacctgccgaagcaggttcataaacattgattaggctttgattttgtatcttcttggttttcctgagaaaatcacagtaccaattatagagcaattaccgttgatcttaatgtaaggctcaggccagtttgggtttaacgctttgagataacgctgtgtcccatcttctatcaaccttttgaaggtggtttcacctgtatcgtgcatcaatgcaataacgtcgtcaccgtggcaggcaggtacttcaggatcgacaaaaatcatgtctcccgggcggtactcatcaatcattgaatcacctattacccgcaagatataagtcatttccccacagggtacagggcagggatacgtttctgctgtgctcaaatcaacctcagaatatccaacttctttccatgctccggcctgtacccatgatatgacagggactaatgtgatttgtttattagtgattgaaacatcaggtttttttgtgatgttcgttgtctggtgttcttgatcgagccatcctacaggcaggtcgaaacatttttcgatgtgtcgtgccatgctgtcaccgatatttttagtagcaccatctcccataaacctgctggtctgggttggctcgcgatcaatcatagtggcaaaggaagaattcccgccaacaccatctctcagttttctggcgttagaccgccggatgtcatggattgttttcataacgaaattaaaacccttgtaccgttaaggtacaagtatcttgaaggttcatttcaatcatgtaatatgtacaccggaggtacatattgtatgaaagcgtattgggactctttaaccaaagaacagcagggcgagttggccggaaaagttggctcaacacctggctacttacggctggttttcaatggctataaaaaagccagttttgtgctggctaaaaaacttgagcaatacacatcaggtgcaattacgaaatctgacttaagaccggatatctatccgaaagattagcagaacactttcaatttttaaccacagaacgatgaggctaatcgtgggtaagcatcactggaaaatagaaaaacagcctgagtggtacgtgaaagctgtcagaaaaactatcgcggcgttgccgagtggttacgctgaagcggctgactggctcgatgtaacagaaaacgctttattcaaccgccttcgtgcagatggcgatcagattttcccgctgggatgggcaatggttttacagcgtgctggtggcactcacttcattgctgatgctgtggcgcagtctgcaaatggcgtctttgtgtctcttcctgacgtcgaggatgtggacaacgccgatattaaccagcgtctgctggaagtcattgaacagatcggcagttattcaaaacagattcgttcagcaatcgaagacggtgtagtggaaccgcatgagaagacagcaattaacgacgagctgtatctctcaatttcgaagctgcaggagcatgcagcacttgtctacaaaattttttgcatttcagaaagtaatgacgcccgcgagtgtgcagctccgggcgtcgtggcgtcgattgcttctggttgtggagaaactaacgcatgaacagtttaacaacacactaccgtcgctcgcaactgattgcgcttcctgtaccgggtggaaaagcgaaggtggaatattgctatgcagtgaatgtaccaggtgacagggaaattgtaacccacagctttgcagagtgggctgtgggtgatttcaaccggcagaaggagacagtcctttgcgacaagttaaccgctggttcaaagatcactacggagtgcccgtcagagtcattcgttgggagccggaaacacaacgggttatctacctccgcgaaggttatgagcatgaatgcttcagcccgctcgaacagtttcgtcgtaaattcagggaaatagaggtcggtcatgagcactaaattaaccggctatgtatgggatggttgcgctgcatcaggcatgaagttatccagcgtggcaattatggcccgcctggctgatttcagtaatgacgaaggtgtgtgctggccatcaattgaaaccattgcccgtcagattggcgcggggatgagtaccgtcagaacggctatcgcacggctggaagcagaaggctggttaacgcgtaaggcgcgtcgccagggtgatggttcatcaccccactgtgccgtggtggatgaatatcacgagcacgccacagatgcgctttacaccacgatgcttaccgggatgggggcgcgacgccagccactgatgtgggccattaccaccgccgggtacaacattgaggggccgtgctacgacaaacggcgggaagtcatcgagatgctcaacggctcggtgccaaacgatgaactgttcgggatcatctataccgttgatgaaggtgacgactggaccgacccgcaggtgctggaaaaagccaatccaaatattggcgtgtcggtttatcgcgaatttttgttaagtcagcagcagcgtgcgaaaaataacgcccgtctggcaaacgtctttaaaacaaaacacctcaatatctgggcgtcggcgcgttcggcgtatttcaacctggtgagctggcagagctgcgaggataaatcactgacccttgagcagttcgaggggcagccgtgcattctggcctttgacctggcgcgtaagctggatatgaacagcatggcgcgactttatacccgcgagattgacggtaaaacgcattactacagtgtggccccgcgtttctgggtaccgtatgacacggtgtacagcgtcgagaaaaatgaagatcgccggacagccgaacgctttcagaaatgggtggaaatgggcgttctgaccgttaccgatggtgcggaggtggattatcgctacatcctcgaagaggccaaagcggcgaacaaaatcagcccggtcagtgagtcacccatcgaccccttcggggcgaccgggctgtcacatgaccttgctgatgaagacctgaaccccgtcaccatcattcagaactacaccaacatgtccgatccgatgaaagagctggaagcggcgattgaatcggggcgctttcatcatgacggcaatcccatcatgacctggtgtatcggcaacgtggtcggcaaaaccattccgggtaacgatgatgtggtgaagcccgtcaaggagcaggcggaaaacaaaatcgatggtgcagttgcgctgattatggcggttggcagagccatgctgtacgagaaagaagacacgctgtctgatcacattgagtcctacgggatccgctcgctttaactgaggtaattatgatcatgctgattctcgcgcctctggtgggcgtgctgggtgcgcttttgctggcgtatggtgcctggctgatttatcccccggcgggttttgttgttgccggggcgctgtgcctgttctggtcgtggctggtggcgcgatatctcgaccgtacacagtcgtctgtcggcggaggtaaatagtgttcttttcgggattatttcaacgaaaaagtgacgcaccggtgaccacgccagcagagctggcggatgccatcgggctgtcgtatgacacctataccggaaagcagatcagcagtcagcgggctatgcgactgacggcggttttttcctgcgtcagagtgctggcagagtcggtcgggatgttgccctgcaatctgtatcacctgaacggcagcctgaagcagagagccaccggcgaacgtctgcataaactgatctccacgcatcccaatggctatatgacgccgcaggagttctgggagctggtggtcacctgtctgtgcctgaggggaaacttttacgcctacaaagtgaaagcatttggcgaagtggctgaactgctgcccgtcgatcccggctgtgtggtatatgcgctgggaaggtgtcagcgatggcctgaaggtgaccgccgggagtgttattcagcgcgatgacctggtgcagtacacgacaactgacgatgcaaccagctccggtggtgtcctgcgcgtgccgatcgcctgctcaagtgcaggtgcggtcggtaacgctgacgacggtacggcattaatcctggtcacgccggtgaatggtctgccgtcttccggtgtggctgacaccctgacaggcggatttgatactgaagagctggaaacgtggcgcgcccgcgtcattgagcggtattactggacgccgcagggcggggctgacggggactatgtcgtctgggctaaagaagtgcccggcattacccgcgcatggacataccgtcacttgatgggaacgggaactgtcggtgtgatgattgccagcagtgacctgattaatcccattccggaagaatcaacggaaacggcggcaagacaacatatcgggccactggccccggtggcaggctctgatttgtatgtgttcaggccggtggcacatacggtggattttcatatccgcgtgacgccggacacaccagaaatacgggctgccattaccgcggagttgcgttcgttcctgctgcgtgatggttatccgcagggagaactcaaggtatcgcgtatcagtgaggcgatttccggtgcgaacggggaatacagccatcagttgcttgcaccggtggacaatatctccattgcgaaaaacgaactggcggtactggggacgatttcatggacgtgacaaacgatgattacatccgcctgttatcggcactgttgccgcccggtccggtgtggtcagccagcgatccggcgattgccggtgcggcaccgtcattaacccgtgttcatcagcgtgcggatgccctgatgcgggagctggatccgcgcaccaccactgaactgataaaccgctgggagcgtctgtgcggtctgccggatgaatgtattccggcgggaacgcagacccttcgccagcgtcagcaacggctggatgcgaaggttaacctggcgggcggcatcaacgaggatttttatcttgcacagcttgctgccctgggcagaccagatgccaccatcacgcgatacgacaaaagcactttcacctgctcatcggcctgtactgacgcggtgaatgcgccggaatggcggtattactggcaggtcaacatgccagccaccaccaactccacctggatgacatgtggcgatccctgtgattccgcactgcgtatctggggtgacaccgttgtcgagtgtgtgcttaacaaactctgcccgtcgcatacctacgtaatttttaaatatccggagtaatccatgcatcgtatagacacgaaaaccgcgcagaaggataagttcggcgcgggtaagaacggttttacccgtggtaacccccagaccggcacgcctgccaccgatctggatgatgactactttgacatgttgcaggaggaactttgcagcgtggtggaggcatccggtgccagcctggagaaggggcggcacgaccagttacttaccgcacttcgcgcgctgctgttaagccgcaagaatccgtttggcgatatcaaatcggatggcactgtgcaaacggctctcgaaaaccttggtttgggagaaggmgcarmactcaatgcagcaacggctacattaggacgcaccggtttcatagctataccggttatgattggtggtattgagcaatcagtaatcattcagtgggggtggaatgccgcaaaagcatctgcctctgggggggatggaaatacagttgtattcccggttgcgtttaataatgcctgtgttgccgttgttgcaaattatgacaatgtcagcgcacctatcaatgcagtggcaacggggggatatacaaccacttcgtttttattacggtgcgcagctcaaacgggtagttattactataactggattgctattgggtattaagatgaaaatatactgttgcttaaataccgttggtttttttatggatggctgtggcgtcattccgccagattctaaagaaataacggcagaacactggcagtcattattaaaatctcaagctgaaggaggcgtgatcgatttttctgtttttcctccttctattaaagaggttatccgtactcatgatgatgaagtcgcagatgcgaactttcaaaagcagatgcttatctctgatgcaactgattttatcaatagcagacagtggcagggtaaggctgcattgggaagacttaaagaagatgagctgaaacaatataatttgtggctggattatctggaagcactggaactggttgatacatccagtgcgccagatattgaatggcctacgcctccggcagttcaggccagatgacatccggcgcggtgctggtatctgttgccgtcaccgcgtcaatgtaatccagcacagcgttaagtctggttgtttctgcctgcgtcagtttacgtccggcctgcaatttcagttgaatcagactaatggaagccattgcagcatcaatcagtgactggcgctgtgcttctgccgcgtctactgcggcgctatgctgtgcttcagtatcggtcacccatttctcaccatcccatttatcgtatggagataaaggggcgatagtggttgtattttcagggtaatcacccggagctttgatttcttttgattctccagttttggtgctatagaccgtttcaccgcgatggtctggcacatattcccatgagttaaaatctgcagaacggcagattgcataaccagccttatgtgtaccaggggcatctaaacaggaacatgccggaatgccgacaccaacggcaagatattcatttgaagtggaaatatattcccgtgtttcaccatcgtagttataaacggtaacatcccctgcctttgttgcaataaggtcactatttaatattgctttatgcatcaggctgccctcacgatatagttaaatgcaatattacgcggacgcgtttctgaggctgcggcacctaaaccatccactgattgtttatatgttttaaaggttccataatccggggctggtaatccggcatcgtttgtgtttcctcttttgataatgtcagtgccactatttacccatatttcatcaaaatagaaattaatcgttgcatcagtcacaatcgtggatcttgacggtaatccatgagcatgatcctccgttgcatacccctgaatacttaaaatagagcgacctgtatcaatcccccgcccgtcatcccagccacgaataaactcaccacgtaaatcaggcaatttatttgtcggataagcctttgccagttccgggtattcttcagcagaaaaagcggcaccattgcatttcagccagcctgttggcggagtggctgaaggccacggaaccgggacaccaacaggtaatgcagagccttctcccaaaccaacgtttatgaaaatgaagaaataacaagcaaatggcatcattcctgcttttaccagggggatttaacatgcttattggctatgtacgcgtatcaacaaatgaccagaacacagatctacaacgtaatgcgctgaactgtgcaggatgcgagctgatttttgaagacaagataagcggcacaaagtccgaaaggccgggactgaaaaaactgctcaggacattatcggcaggtgacactctggttgtctggaagctggatcggctggggcgtagtatgcggcatcttgtcgtgctggtggaggagttgcgcgaacgaggcatcaactttcgtagtctgacggattcaattgataccagcacaccaatgggacgctttttctttcatgtgatgggtgccctggctgaaatggagcgtgaactgattgttgaacgaacaaaagctggactggaaactgctcgtgcacagggacgaattggtggacgtcgtcccaaacttacaccagaacaatgggcacaagctggacgattaattgcagcaggaactcctcgccagaaggtggcgattatctatgatgttggtgtgtcaactttgtataagaggtttcctgcaggggataaataaagttaaagacactttgtgtacaaaagaaagtaaaacaacagcaacttgttgcaattttatcaataaaagtagtattgtcgtgaaaaattgattaaagattaatattatgcatgtttttgataataatggaattgaactgaaagctgagtgttcgataggtgaagaggatggtgtttatggtctaatccttgagtcgtgggggccgggtgacagaaacaaagattacaatatcgctcttgattatatcattgaacggttggttgattctggtgtatcccaagtcgtagtatatctggcgtcatcatcagtcagaaaacatatgcattctttggatgaaagaaaaatccatcctggtgaatattttactttgattggtaatagcccccgcgatatacgcttgaagatgtgtggttatcaggcttattttagtcgtacggggagaaaggaaattccttccggcaatagaacgaaacgaatattgataaatgttccaggtatttatagtgacagtttttgggcgtctataatacgtggagaactatcagagctttcacagcctacagatgatgaatcgcttctgaatatgagggttagtaaattaattaagaaaacgttgagtcaacccgagggctccaggaaaccagttgaggtagaaagactacaaaaagtttatgtccgagacccgatggtaaaagcttggattttacagcaaagtaaaggtatatgtgaaaactgtggtaaaaatgctccgttttatttaaatgatggaaacccatatttggaagtacatcatgtaattcccctgtcttcaggtggtgctgatacaacagataactgtgttgccctttgtccgaattgccatagagaattgcactatagtaaaaatgcaaaagaactaatcgagatgctttacgttaatataaaccgattacagaaataaaattatttattaaagtcacatttaagacgtaataccctacagggtaaaaattttctctgatcttaacttctgcaaatgttaactgctatttttatgctaaaaatggttatcaaaactcaaaaacacatgtttataatcaatgagttatagaaatgctaagggctaatgagttatatgcaaattagtaaaattatgttgctatgtcagatagttacgatttagtcatctaactaatgctgcgccatatgggttggactgaagcggctgacctgattgttaaaggtatggaaggcgcaatcaatgccaagaccgtaacttatgacttcgaacgtctgatggaaggcgctaagctgctgaaatgttcagagtttggtgaagcgatcatcgaaaacatgtaatctctccatgtgttaaatattgaaacgggcgtataacacgcccgttgttttatttatgtggatattattaatagcatatcgagcatatttatatgaagcccattacttgagcccatatgggcatatttttataatgcaactattatgtaaacatttatttgttattttgctttctcctggaggacactcttgactgcttttgagtaaactccataaatccttgttgaatggtgcgatgtgataaatagtaataggatattctttatccttaaggataataccagacttaaccggtgtaaatatactgccaggagggagaaatatagtagattgataccagatgatcattttcatattaccccatatggctgaaaaagatataccacatgtaggttgaattaccgtgtcaattactatccacttcatttgttatgtcttatcccacggtatttaatatggttcattaggatgtttatttcttgattttgcatatgagtatattacccccccctcaaaaaaataaattaattaaaatgatggcttatataaaataaaatttaaagcaaggaatctcaatggatgttaaacaaaatgagattttgtgaaagcaataaattattgacttcgttttagatttgtttagctataatgttatacattcaaatgactgaacatcctgtaattaaaacatagcctttatgctactttgtgccaatttgctaaacattatggttgcctttttatataacgataataatgaatataagcatgacatgagaataaggtttcaatttttgagttatataggaatgatttaacctgttcctggctaaaatacatataaccggatgatgactaaaccaaaatacatgtgcgttaagtattgaaacggacgtgtggcacggccgttgtttttataaatatgttaaccgttataaaataacgtatcaaaagtcaagtgatcacatttcaaatatcaagttgatagtattagtctggtgattatttatgggtgacaataaaaagacagtattaatcatccatagagatagtctctgcacttttatttccattatgctaatgccttactgaattatgaagcatttcttaagtatccaactttagctagattaatggtttattattttctacatcttcaatatataaaagcgtattatcaatggcgtagtaactgcgtttgttatgattaacatcagtaacccaccggaaaacgcccgcgcctgccagtgttgaacagtattcccgaaatgtagattttccgcaaatatgaagcaatgcggcctcttttattttagcagggttcttggtcgtactaacttttaacaggttcctggttcctcttaataacaaaaccgtatcatcgtgagtaataattctgatgttatccgtagccagataataaatgtaatgtgcaatacggtgatgttttaattctgaataaaaccaggagaagttttgctcttttctcacttgctcaaacatcttttgaaaaacaacgacctgatccatcaggataataacctcttgttagttgtgagactgcgtagtgtgcacgatcggttttaccacttcaatctggtctgtcctttggctgtgatatgtacagagtgtgatagagggaatatctgaattctcccggtgagcattttgcaacggaccagctccggtacaaacgctgttgtgggttcagattataacattctgtctaaggggcgggataaaggtgaaattagggggcatgaaagatgactttataaccttgctcaccccagtgttgtaaaagttcgttttgccttctcgttggtgccatgcctgtccagacaatcaatgtttgcgtcgggaacagttccgggcgcggcgattcaatgggatcagcaagaacagaaatgtgccatcctgacaatgataaacgccatgcttccagccacaatcgtgctctctcttcaacattccacgccatcagaatggcttctttaccgggcttacggcgcatttcgaaaagcgaggttgctgcgtattcaattaatgcgccgtcaaacatactgctcataatgcgggaggtgttgtgatcaagcacgagacgctggcgaacaggaaggtaaacatgattaatcaattgatctactgggtactctcgacccagtgaaataattctcgcgcgtagtttggcaggattagccatgcgaagaattgacatcatctcttcttgcaggcggctccagtcatcttccgtatcctggctggtggtttccagtaatgctttaactttgcctacagggacgccattacttatccaacgcttgatctcttcgatgcgttgtatgtcttcttcatcaaagagtcggtgtccgccttcactgcgctgtggttttaacaaaccgtagcggcgttgccaggcccggagagtgacaggattaatcccgcaacgttcagcaacatcaccaatgctgtaataagccacaattcctccttgcggtcacaaatctccgtcgcctgtacacgacccaataatactttgtacaatatacgctaaaattgtacaaagtataaataagatttcagctaaattggatgaaacattatttttaatgtggattaaatttaaacgtaacgtattcattttcacgatgatttactgaaatcatgtgaaagaatgtgctgaaaattattttttctctggccacgctatggaagggataccattcaatttagctttagcaaacagatctccctgaaacatctcaattcctgcggattcaagccacatccactcttctggtgttgccacgcccatagcactgacttgaatttcaagtgatgtacagcattttatgatcgcctgaataattgcctgccgtggcccacttttatgaacattggtaatcaattcctgactgattttaattctgtcaggctggaagcgtgacaggagtaacaaaccagcaaaacctgcgccaaaatgatcaattgctacactgataccagcagcctttagcgatttaatcgcttcggcaaactcatcaaaccgagatatgacttcactttcagtaaattcaacgatgatttgttcaggcaccagagcattggcctttatttcattaagtaaaaaagagactgcgtcaggttcgttaaccagggtcataggtaatagattgattgaaatcattttatcaccgagctcaagtgcgtgtgccatcgtgaatgcaagcgccttacttttgagatccgctgtgtagatttccccgtctttacgctgcccaaccgctatggctgatgggctatcttcatttttttgcacaatggcttcaaaagcgattatccgccgcgataagggatcgacaataggatgaaaggcaaagtggtcgtttatagttggtgaaagggcacaggaatcaagttctttatcagatccgtcagcgataaaaagccaggagtcttcggcagggatctcgaaataggttgattgttcggttgcaaggacaaaagtacgaaaaaattgtagcgctctgtcatcataagttagctgaaattttgatgtgcctttgtcgaatacggcctgtaaaacgtcatctcgctcgtgcaggcgcaaatcaaataattccattcccgctttgccaaaacggcgagcaggcgcgtaatcgcacagcagctcaacaatattatagtgccgtggatcctggcatatagcccgatatatcattttaacctgttcttccggaccttccagaagctggaaaaaatgagaaccattaaacagtaagatccctgttacgtcagactgcatgttcctgcgatttgctatcgaaaccatttcttcgatttttttgacaggttcgtcgtcacgtatatggctacgataaataagggtggtaagcattaacaatccagggtaatgggtgaggcgagagtaagacggtaacagacatatcttcttgtgtctttcttttaataccaaaacataaccgtttctttacattgataaaaaatggaaaaagttgaacactagttggcgaaaaatcttgtatagattgtcagttaaatgatgcaatatgttttatcataacacattgttttatatgcattagcactaattgcaaaaaattaatttatcattctgtacacatatttcgtacaagtttgctattgttacttcacttaacattgattaacatttttaacagaggcgtagcatgcatcaaaattcagtgactttagattctgcgggagcaatcactcgttactttgcaaaagctaacttgcatactcagcaggaaactctcggggaaattgtgactgagattttgaaagatggacgtaatctgagtcgaaagtcgctttgtgccaaacttctttgccgactggaacacgcgactggggaagaggaacagaaacattataatgcactaattgggttgctttttgaataatgcaacagcctgattatttaacaggttagctatgaagtcgttatgaagacatctgataatgaacgtataaaatatgaaattactggccaggcggtgctccagatactgcgcatgaagataaatttttcattgcagactcttattaagcaattactcgtaatgaaatcggctgaggaagatgctttccgacgcgatttaattgacagcataattcgtgattttagcaatagtgattcaggagggccaaaccgaagaacagcgacagctgacaataaaagtatgttcaatggtaagaaaataaacagaatacattaaaatttcataagtaagatgagaggttaccatgcttgaagatactacaattcataatgcaataactgataaagcgttagcaagttactttcgcagttcgggtaatttgttagaagaagaatcagcagtgttagggcaggctgtcaccaatttaatgctttcaggcgataatgttaataataaaaatattatcttaagtctgatacactccttggaaacaacaagtgatattctcaaagctgatgtgattagaaaaacactggaaatcgtgttgcgatacacagctgatgatatgtaacttctaattattaagtataagtttatagaaaactcattcatcttatttttgtctgtcgctttagactatacacagcataattttattgggttaatatttctacgaggctgacatgaataattcaatcccagagagatttatttttcaatgtgctttgtttaaaaatctcgagagggaggtgttcatgacgcatgggtatgttgatagtcatattattgatcaggctttacgcttgcgtttaaaagatgaaaccagtgtgattctttctgatctctatctgcaaatattgcagtacattgaaatgcataagactacactaacggatatcattattaatgacagggaatccgtgctctcttagaacttgagtaaggttttagaataaacatcagctgtatcaccatgctgatgcaaagtgagcatttcaggcgttatgctttcttattatgtccgcaatatcaggtgtcaagaatggagagttctcgctctccattcttgacgcctgatatcccgcctaacttattttgtactgcctacattatgctcaataattaatgggttagatcaagatggagaaaattttatcttcggcgtggatatttcttatgctctctaccatgctctctgtagatgccagcgcgagcgaatgaatggcattttcatgtattaaaccctttggccgggacaagcaaatgcgcaatacactcatacccatcctcgttgcgatatgcttgtttattaccggtgtcgctattttgaacatccagctctggtattccgcaaaagcagagtacctggcgggagcgagatatgccgccaacaatatcaatcatatacttgaagaagcgtcacaagcgactcaaacagcggttaacattgccgggaaggaatgcaacctcgaggagcaatatcagcttggcactgaagcagctctgaaacctcacctgcgcacaatcatcattctcaaacagggaatagtctggtgtacatccctgcctgggaatcgggtcctgttgtctcgtattcctgttttcccggacagtaatttactgttggctccagcaatcgacaccgttaatagattacctatcctgctctatcagaaccaatttgcagatacgcgcattttggttacgataagcgatcagcatattcgtggggcacttaatgtacccttgaaaggggtaaggtatgtattacgcgtggcggatgacattattggaccaacgggtgatgtgatgacgcttaatggacattatccctataccgagaaggttcactccacaaaatatcatttcactattatctttaacccgccgccactctttagcttctacagacttatcgataaaggctttgggattttaatatttattctgttaatcgcctgcgccgctgccttcctgcttgatagatatttcaataaaagcgcaacgcctgaagagatcctgcgacgggcaataaataatggggagatcgtccctttttaccaacctgtggtaaatggtcgggaagggacattgcggggagttgaggtgttagcccgctggaaacaacctcacggtggatatatatcacccgcggcatttattccacttgctgaaaaatccggattaatcgttccgcttacgcaaagcctgatgaatcaggttgccagacagatgaacgctatcgcgagtaaattgccggaaggttttcatattggaattaattttagcgcttcgcatattatttcgccgacgtttgtcgacgagtgtttaaatttccgtgacagttttacccgccgcgatttaaaccttgttctggaagtcaccgagcgtgagccattgaatgttgatgaaagtctggttcagcggttgaacatactgcatgaaaatggttttgtcatcgcactggatgatttcggtactggctactcagggctttcttatcttcatgacctgcatattgattatatcaaaattgatcacagtttcgttggccgcgtaaacgcagacccagaatcaacccgaattctggattgtgtattggatctggcgcgtaaactttcgatcagtatcgtcgctgaaggtgtcgaaacgaaagaacaacttgactatctgaaccaaaattatatcacatttcagcagggttattatttctataaacctgttacatacatcgacctggtcaaaattatcctttctaaaccgaaggtgaaggttgtggttgagtgaaaattgatcagtaaggccatagtgcggtgtaattatagacagctaattagctcgttgcctcttgttactattgttcattattttgtttgctataattgtttgaaagttttgacaggattgccattagtagcatgaacaatagtaataatctggattatttcactctctatatcatattttccattgcatttatgctgatcaccctcctggtcatccttattgcaaaacccagtaccgggctgggagaagtgcttgtgacgataaatttgcttaatgcccttgtttggctggcgatcaatctggttaatcgattaagagaaagactcgtcaaccacagggatcagcaataatctttcagtttctcactgtcagtatgcggctgaatgggttgctggcagtgaacgcctggatcattgaaggaaaggcattattgcgcaaatagttgtcaaccctggtgttatcacggttgtttttatatatcaccgaaataatcctcatcgcaactattaacaattttgatgtcgaagagttatttgttaaacaaaatcgtcacctcaaagtgatcaatgtcatgaaaataaggtgaaaaatgataatgccgacttatttatcatttatatattgtcgctgtttatctatttaaattttttgtgcttttgtttttgtctttaccctccgttttggtaatctgagctcataggttatttgaccaggaatgtttgttaatccaatgaatggatggttaatctatgaaactgaaaaaactccccgggtttagtttgggacttattgctctggcggtgggtaatgcatatgcaacacaattgttggatgattatagtataatttcctatatgactgatgaagaatcgccgattgaaatcaaagataataatccgataagtaatggagagtatctaaccactgaagacgaaagccatgctgtgaaagtggatgacggtgtaactggatatataaataatgccagtgtgatgactagtggtgatggatcttatggtatttctgttgatagtcaaaacaaagtattatatataagcgatagcgatattaagacctctggaagcgtatctgacaaagaaaatggagggataacagccagcgcagtagtcagtgaatttggtggcaccatctttatgaatggtgataattcagtcgagtcgggtggggcatattcagcgggacttttaagccaggttaatgattctgaaaagatggtaaataacacccgtcttgaaaccacagataaaacgaacattgttacctctggggaaaatgcagtaggtgttcttgcatgttcaagtcctggagagtctcgaacatgtgtcgatgctgtagatgatgaagttagtgattctaacagttacgaagttattagccgtgctgatttaaaaatgaatggtggttccataacaactaatggcattaatagctatggtgcttatgctaatgggaaaaaagcatatattaatttagattatgtggcacttgaaactgtggctgatggaagttatgcagttgctattcgacaaggtaacattgatataaaaaatagttctattacaacaacaggcactaaagcccccattgcaaaaatatacaatggtggagagttatttttttccaatgtcaccgcggtatcaaaacaagataaaggaatatcaattgatgcatcaaatatcgattctcaagccaaaatagcactattaagtgttgaactttcaagtgctttggatagtattgatgttaacaaaactacaacggatgtaagtatccttaatcgaagtattatcacacctggtaataatgttctggttaataatactggaggtgacttaaacataatttcgtccgactctattctaaatggagcgactaaactcgtcagcggcacaaccacgctgaagctttcagaaaatacaatctggaatatgaaagatgactccgttgttacccatctgactaattcagacagtattatcaatctttcgtatgatgatggtcaaacatttacccaaggaaaaacattaaccgtaaaaggtaattatgtcggtaataatggtcagcttaatatccgcaccgtattaggtgatgataaatcggctacggacagacttattgttgagggtaatacttcgggttcaactaccgtctatgtgaaaaatgctggaggaagcggcgcggccacgctaaacgggatcgaactcataactgtgaatggcgatgaatctccagcagatgccttcagataaggtgatgcaaggattgcagctggagctttcgaatatcaactaaaacaacaaggcaaaaactggtatttgacaagttatcagtcagtgaatgaggaggataacagctcagagggaaattcagaatcaacagaaacgcctacccccgtcctgcgccccgaagctggaagttacgtcgctaacctggcagctgctaacactctttttgttatgcgtctgaacgaccgtgcgggtgaaacgcgctacatcgatcctgtaactgaacaggagcgttcaagccgactttggctacgtcaaattggcgggcataatgcctggcgtgacagcaacggacagttgagaacgacctcgcatcgctacgtctcgcagttagggggcgatctgttaaccggtggttttaccgatagtgacagttggcgtttgggagtgatggctggttatgcccgcgactacaacttaactcattccagcgtgtcggattatcgttcgaaagggagtgtcagaggctatagcgcagggctgtatgccacctggtttgccgatgacatcagtaaaaaaggcgcatacattgactcctgggcgcaatatagctggtttaaaaactcggtgaaaggggatgaattagcctatgaatcctatagcgcgaaaggtgcaaccgtctcgctggaagcgggttacggttttgccctgaataaatcctttggtctggaagcggcgaaatatacgtggatcttccagccacaggcacaggctatctggatgggcgtcgatcataatgcgcacacggaagccaatggctcacgtattgagaatgacgcaaataacaacatccagacccgactcggcttccgcacctttattcgtactcaggagaaaaacagcggtccgcacggtgacgactttgaaccttttgttgaaatgaactggatccataacagtaaagattttgctgtctcaatgaacggtgtgaaagtcgaacaagatggggcgagtaatttgggggaaattaaacttggcgtaaatggcaacctgaatccagcggccagcgtctggggaatgtgggcgtgcagctgggtgataatggctacaatgacaccgcagtgatggtgggcctgaaatataagttctgatcccgccgttagctaaaaaaccgcgtcgtattcatcgacgcggtacatatgaaatattattttttgccgatagcacgcatggtgtcatcaattgccgtgatcaacagcatttgcgggtctttagcgcaaacctgattcagtttttctaccactttggcgctcagttccggagattgctcaatttttaaatcacggctggcaacgctggcattacccattaccgcaacaatttctgcaacctgtgcgctgtcagtttttgccatttcgttggcttctgcgcaagtaatataggtttctgacggcaaaccgtttttaatattgtagtcctgcgcccaggtcattggtgcgaaaacaaacaggcccgccagtaaagcaaattttttcatcatcattccttatttcattttacccagaattgcaccacccgtaccgccaatcacggcacctttaatcgccccttcgaggccattgccggtcagaacgccagtgacagcaccaacggcggcacccacttttgcacctttacgcgcatttttaccgtcgcggcctttttctgttactgcaccaacaccagcgccaacagctgcacctttcagtacgccattaacaccattgccagtaagtaaaccaacgcctgcgcctagcaatgcacctttcgtggtgcggttcatatccgccatcgctggcgtggagcagaacaatgctgagataagcccgaaggcaagtatttttttcttcaacttagatgtccggtattaagtaagttgcacacacaataatttcgtcttcaattaagatctgcttaactaaagaacgctcgctattattcagataattcaaaatgagcgtggctgtgatgataggaattatgttttttacgtgaatgagaataatcttaaatgaggaataactcattgattgacaatatttttattcaagaagtgtcattgactgttaacgcaatgttgtaaaggtaagataatctgatttatcaatattattgtgtgatttttatgtgagcagaagatattcatcagcaacgattacattagtcattttattttgccgacggcctcattgtcgaaagataagcgtacgacagtattatcagaaaagagtgattttttatccaactacacttcagcgcactgcgtgtaaaaaatgcctctttcttatgcgggatatcatcatttcatcatgatgtctttggtgagcggtgaacacaatacacctgcgctgtctcttcaggatgaatcccctggtctggtgcctgcgggctgatgttgcagcagagcttaggtcacttagacgctactatcatttatccaatggcatggaatcgaaatcagtcgatacccgcagtatatatcgtgaactgggtgcaacgctgagttacaacatgcgcctggggaacggtatggaaatgaaccctggctgaaggcggctgtgcgcaaagaatttgtcgatgataaccgggtgaaggtgaataatgacggtaatttcgtcaatgatttgtcgggcagacgtggaatataccaggcagctattaaagcctcattcagcagtacgtttagcggacatctcggggtggggtatagccatggtgccggtgtggaatccccgtggaacgcggtggctggtgtgaactggtcgttctgaccatcaacgattaaactgcgcttcggcgcagttttcgtttacaggatgttgaaagggaaaattctggggcaaaaaaagcccgccagttacggcgggaaacctcatcctatgggagaacaatgaataatgaaattgcggggttatcatctcccagtatatccatactaacaataaggttatttactcaaccaggcataaacattttgttttgtgcgtgggaacagccttaaggtgtaaagggggaggtggaaatagcaatgaggagtatcagcaagaatactcgccgctttaccacaacgtggatgagagggatgaaaaactcaaggcagagataactctgccttgaagataaatgcgcttttacagcgggcttatttcagctcttctgcttccggtaaggtcacgttcagctcaagaatagaaatatcgccatctttttgctcaagctgtacggttaccatctcaggatcaatttgtacgtatttacaaatgacctcaagaatatctttacgcaactgcggcagataatgcggttctgcatcgctgcgacggcgttcagcaacaataatctgcagccgttcttttgcaatgttggctgtgtttttcttccgcgagagaaagaaatcgagtaatgccataacttatcctccgaacaagcgtttgaggaagcctttcttctcttcttcaatgaagcggaaaggacgttcttctcccaacagacgttctacggtatctgcgtaggctttacccgcatcggcgttaatgtcgagaatgaccggttcaccctggttagaggcgcgcaatactgattgatcctctgggatcacgccgacgagtttgatgcgcaggatctccagcacatcttccatgctcagcatgtcacctctgcttacgcggcctgggttatagcgcgttaacagcaggtgctctttaataggctcttcgccattttctgcgcggcgtgatttcgacgccagaatgcctaaaatacggtcagagtcgcgtactgaggagacttccgggttggtggtaataatggcttcgtctgcaaaatagagtgccattaacgcaccggtttcaatccctgccggggagtcacaaacgataaattcaaaatccatcgctttcagatcatcaagaactttggcgaccccttcacgggtgagggcatctttatcgcgtgtttgcgatgccggcagaatatagagattttcagtacgcttatctttaattaacgcctgatttagcgttgcatcgccctgaatgacgttgacgaaatcgtaaacgacccggcgttcacaacccataatcaggtcgagattacgcaggccgatatcaaaatctatcacgacagttttctttcccttctgggccaaaccagtggcgatggccgcgctggaggttgtcttaccaacaccccctttgcccgaagtaacaacaataatgcgtgccatagaaattccttgttaaaaagggatcaatttaacggttgaacggtcaaagcgttttcgactaactgcagtcgcgccgctttgccataaaattctgctgggatttgatcactcagccagtattcacctgcgatggacaccagttccgccatcaggttcgtacaaaatatttgcgtttcccggtcaccacttgcccctgccagcgcacgaccgcgcatcatgccatagacatgaatgttcccatcggcaatcaattcggccccagcgctaacgtggcttgtaacaatcagatcacattgtggagcataaatacgctgaccggaacgcaccggggtatctattaaacgcgtttttgtgaccggcgttgtattttgcgctggagcctgcggtgtgggagctggacgtggcgctttttcctttccttccgtcaggataggcagccccatcttttcaatttcggctttaagttgcgcatctttgcagccacttacgccaataacccgcaaaccggttgccgaaaccgccttatgcatcgctgaccagtttaccgggtcttccagtgcactgacgttgagtacaacgggggcatgttttaaaaatgcgggggcctgagcgattttgtcttccagcgcctgatggataaccttaggttctgcctcatgcagatgaaccacagataaagtgaagctactgcctttaagctcgattggcgtgtttgacatcctggccttactcaattagctattaatcatcgccagcgcgcgatgatgttccgaagactataaggcatgttatagtctggattatattgaggcaagtcaccctcccatttattcagagtaaaagtctattctgtgataaatggcgctgattcatagcttaaaaaatacccttgtcaatcaacccattgccgtcgtacttttgattgttcttatttacgcttcctttttccgcaccctaatcgtgacagcatctccagacctgtttaaatatccagtattgaggcaagtgtattttttcaccacgccaggctttcttaactttccattttttgcggcatcattaaagaacagatacccgttatcttaatatccgccacagaattgctctatcatagaaaccgcagaagacgtctgatacttctgtcaggtcatcgtaactcgtccaggtcagcggttttgattacggattgatgatgaaatgagcataagtgttgtacggttggattatcaggatgtgctatgaatatgatgcgtattttttatatcggattgtcaggtgtggggatgatgttctcatcaatggcgtctggaaatgacgctggcggacttcaatctccggcgtgcggcgttgtttgcgacccgtatatttgtgtgaactcagatggcatttccccagagttaacaaggaaatatctcggcgaaaaagccgctgaaaacttacaatcattacaaggctacgatcccagcgaatttacattcgctaacggtgtattttgcgatgttaaagaaaaattatgtcgtgatgatcgttattttggtgtggatggtaagcggagtggaaaaatcaatcaaaccaccacaaagatgttatttatgtgtcgtgagtgatgtcttgtttacattatgttctattcgtcattaacctcttgagcgacagagaggagtggggcattaacgtttatgacggggagagtccccgtcggttgacatttacttaatttgaatatcgacgttatattttttagttttgtttttacgggcgtcgtttcgggtttgcaacactcgcagctcatatttgccagaagcagggagtgagtattgtccgtgactatcgagttctggggaatatctggataaatcaactgaatcatcgattcctggcccgaagaggtaagtatcagcgccttcattagagatactcacatgcactttctgaccttttttggcatagaaggtatatgtatcgtaatcgtatccctttatttcgccggagtactgagcgctgctatggccttttctgaactcaacattgacattcttacccgcagcaaagctcgtggaggttagcagtgcaagcagcaatacagccttcctgatgctcttgattttcattggtagtctcctgttcagaatgagtacgatgaactgttataatataacaatccctaacgggagaattccagtggctttcctgcgttcggtaaaatcacgttgcggcatttttgccggggggattacttataaagggggcatggactcaacaaaccgtagaaatctacagctggctggcttgtggcgcgggtttcattgatgttagcttatgccaaaacctggcatcttaaagagtaaaagtatgttttgtgtgatttatcgaagcagcaagcgtgaccagacctatttatatgtcgaaaaaaaagacgatttttcgcgtgttcctgaggaactgatgaaaggttttggtcagcctcagttagcgatgattctgccgctggatgggcggaagaaactggtcaatgccgatattgaaaaggttaaacaggcattaaccgagcaaggttactatttgcagttaccgccaccacccgaagatttgctgaagcaacatctttccgtcatggggcagaaaacagacgacactaacaaataaccgatatccggcggtggcattatctttgtcggcgcgggttttcatatccacgataaggtgaggggaacgttatgtatcaacatcacaactggcaaggtgcgctgctggattatccggtgagtaaagtagtctgtgttggcagtaactatgccaaacatattaaagagatgggcagcgcagtgcccgaagagccagtgctgtttattaaaccagaaacggcactgtgcgatctgcggcagccattggcgatcccatccgatttcggttcagttcatcatgaagtcgaactggcggtgttgattggcgcgacactgcgtcaggctacggaagagcatgtccgcaaagccattgccggttatggcgtggcgctcgatctgacattgcgtgatgttcagggaaaaatgaagaaagccgggcagccgtgggaaaaggctaaagcgtttgataactcttgtccgctttccgggtttattcccgcggcggaatttaccggcgacccgcaaaatacaacgctgagcctgagcgtaaacggcgaacaacgccagcaaggtacgactgcggacatgatccataaaatcgttccgctgatcgcttatatgagcaagttttttaccctcaaggccggtgacgttgtgttgacaggcacgcctgatggcgtcggcccgttgcaaagcggtgatgagctgacagtcactttcgatgggcattctttgacaactcgcgttttgtaatactttttgccgcctgaaagcggcggcaaaacttgcatcgctgtgccagactggttataaggtgcgttttaacgtaatggcggaacacctgatgagcgatgtacctttctggcaaagtaaaaccctggacgaaatgagcgatgcggaatgggagtcgttgtgtgatggttgcggtcagtgttgcctgcataaactgatggatgaagacaccgacgaaatctacttcactaacgtcgcctgtcgccagctcaatattaaaacctgtcaatgtcggaactacgaacgtcgtttcgagtttgaacccgactgcattaaattaacccgtgaaaatctgccaacattcgaatggctgccaatgacctgcgcttatcgtttgctggcggaaggtaaagatttacctgcgtggcatccgctacttactggttcgaaagcggcaatgcatggtgaacgtatctctgtgcgtcatatcgcagtgaaagaatcagaagtgattgactggcaggatcatatcttaaataaacctgactgggcgcagtgataaatttaatagatgctgatgggggctttcttaatatacgtctggatgctcgccatttcgtagccctgtttttgaaagcgctctgtcataatgagagttacccgataccttattatcaacaggtaactctcaatctttaaaaaacgtctgtgtttttaaatgtgataaaccttataccttgagtacatggagagaataatcgcttatcagacttcaggtacctcaaagagtgtctttttaccgtgtcttttctgatactcattacaggtgttaatcatttttttggccgcttcttttagcaaagaaagcattaaatcatcataatcaacgtagaatctggttgtttcagtttccgtttttatctcaccgatggcggctatttcggtggttaatttcaatttggcggcatcgatatctttattcgcttgtttaaccgtgttagacagggtggtaaagaaattctgcacagattttaacttgttcttcaattctggaatcagttttccttcaactacgcccgcagcaatagaataggaaatgattaatccaaatggaccggcgacgacaccggctgcggcaccggcatatgcttccttcctgattttatctacctgtgactggaaatagctgcttttttctgaaaaatcattggttaactggctatctaacgccagcagtttcccggaagcgttgttgaaactttgtgagcttaccagcagggatttttgcgcttcattcagcttcgtgatgccgtcatccagtaccttaatgagaatgtctttctgggcggatgctttcttctcattgtactcatcaaatagcaaaatatacgctgcgagcaattgcgtcgcaacaccacaccattcatacactgtttgggttgcttcaaaatacttatcctggctatccataagtaaggttttaatatcgccgactaaaacggaggctgcctgtgaatactcctgtttaaagcgacttaactcttttatggtttcatcaaaggtctgccaggggatgacctgatcgagatatttattataaagatctaatgctccatctgcggtttcgattgcgtttttaactacttctaccgttttatctgcaacgatttcagtcataatcattcgcctctttaaatatataaattgtaatgaaactcctgttttacaactattaataaattttacttcatctaattcatagttagccgggcgggatgcgtcaatgtctttatttctattaatatgataaatatcaaacaatgtttaatgtcattatggcgaatgcttctattctattttttagccgggtgatatttttcatttctgctggatgagcgtcgtcgccagaaggccacgtgagcacaagataagagaacgaaaaatcagcagcctatgcagcgacaaatattgatagcctgaatcagtattgatctgctggcaagaacagactactgtatataaaaacagtataacttcaggcagattattatgttgtttatcaagcctgcggatctccgcgaaattgtgacttttccgctatttagcgatcttgttcagtgtggctttccttcaccggcagcagattacgttgaacagcgcatcgatctgaatcaactgttgatccagcatcccagcgcgacttacttcgtcaaagcaagtggtgattctatgattgatggtggaattagtgacggtgatttactgattgtcgatagcgctattaccgccagccatggtgatattgtcatcgctgctgttgacggcgagtttacggtgaaaaaattgcaactacgcccgacggtacagcttattcccatgaacagcgcgtactcgcccattaccatcagtagtgaagatacgctggatgtctttggtgtggtgatccacgtcgttaaggcgatgcgctgatgtttgccctctgtgatgtaaacgcgttttatgccagctgtgagacggtgtttcgccctgatttatggggtaaaccggtggttgtgctatcgaataatgacggttgcgttatcgcccgaaacgctgaggcaaaggcgcttggcgttaaaatgggcgatccctggttcaaacaaaaagatctgtttcgtcgctgtggcgtggtttgctttagcagcaattatgagctttacgcagacatgagcaatcgggtgatgtcgacgctggaagagctatcgccccgcgtcgagatttacagtattgatgaggcattctgcgatctgacaggtgtgcgtaattgtcgcgatctgactgattttggcagagaaattcgcgcaacggtgctacaacgtacccatcttactgttggtgtggggatcgcccagaccaaaacgctggctaagcttgccaatcatgcggcaaaaaaatggcagcggcagacgggtggggtggtggatttatcaaatctggaacgccagcgtaaattaatgtctgctctccccgtggatgacgtctgggggattggacggcggatcagcaaaaaactggacgcgatggggatcaaaaccgttctcgatttggcggatacagatatccggtttatccgtaaacattttaatgtcgtgctcgaaagaacggtgcgtgaactgcgcggcgaaccctgtttgcaactggaagagtttgcaccgacgaagcaggaaattatctgttcccgctcgtttggtgaacgcatcacggattatccgtcgatgcggcaggccatttgtagttacgctgcccgggcggcggaaaaacttcgcagcgagcatcaatattgtcggtttatctccacgtttattaagacgtcaccatttgcgctcaatgaaccttattacggcaatagcgcgtcggtaaaactgctgacgcccactcaggacagcagggatatcattaacgctgctacgcgatctctggatgccatctggcaagcgggccatcgttaccaaaaagcgggcgtgatgctgggggatttcttcagtcagggagtcgcgcagctcaatttattcgatgacaacgcaccgcgccccgggagtgagcaattgatgacggtaatggatacactgaatgctaaagagggcagaggaacactctattttgccgggcaggggatccagcaacaatggcagatgaagcgagccatgctttcaccacgttatacaacgcgaagttctgatttactgagggtcaaataaatatagcggcaggaaaaaagcgctcccgcaggagcgccgaatggattagcgaccgaacagatcacgttttttcgctttaaacggctgggaaatcaccaccagcactgcgacaatcaggtaagcgataaaaataccgagcagccactgcggcatttccagacctaaaaaatcccactgacgctcggcgcaatcgccagaggcgacaaacacttgcggcacccacttatccagcggcagccattccgggaaacgaaccataaaatcacaggtggcaaacggcgaaggatagagctgaagcatggtgtgctcgtaagttaactgcacaccgcggaacgcactatacaaccagataaccatcgctacataacgcagcggagttttcggggcgatcgcgccaatcagcgcagcacccagaacgccgaataacgcgcagcgttcataaatacagagcacgcaaggtttcagtaacatcacatgctggaaccacagcgccgtcagttccagtgccagagcagtaaacgccatcaacagccacgcgccccggccttgtgaacattggttcaaaaatcgcaacataatcatttccctgcaatatgcatagagtgcgcagtttaaaccaattcattcgctgcgccaccaggaggcagcaaaaataggacgcaattggacaattatcgggcgaaaaggcaaaccgggcatttatatgcccggtaagttgttatcaaagcgttgctatccagcccatttgcataaaccattcggttacaggggcaagcgtaaactcgacgcagagcaagccgacgagtgtcaggacgagggtgtaaggcagggccatccacaccatgcggccataagagaggcgaatcaatggcgcgagtgcagaggtcagcaggaacaggaacgcagcctgaccgttcggcgtagcgacggagggcagattggtaccggtattaatggcgaccgccagcagctcgtattgcttcaacgtgatagcgccactttccattgccgctttcgcttcgttgatataaatcgtccccacgaagacgttatccgaaatggatgacagcagaccgttgaaaatatagaacagcgacagctgagcatgttccgatgcctgcaacacaaactgaataattggcgaaaacagttgttggtcgataatcaccgcgactaccgagaaaaacaccgtcaacagtgcggtgaatggcagagattcggtgaaggctttaccgatagcatgctcatcggtgacaccggtcaatgatgttgccagaataatgactgacaaaccaatcaagccaacttccgccagatgcaacgccagcgcagtcaccagccagacgccaataatcgcctggacaatcagacggattttatcctgacgggtacgctggtggcggctttgatcgtcaaactgttgcaacacttcgcggactttctccggcagcgtttcaccgtagccaaaccaacgcagcttctctaccagcaggcaggttaacaggccacaaatcagaaccggaacggtcaccggcgacatgcgcaggaagaaatcgccaaaatgccagccagccgctttagcgatgatcaggttctgtggttcgcccaccatggtcattacgccgcctaatgcggtgccgacaccggcatgcatcatcaggctacgcagaaagccacggaactgttccagaaccactttgtaatgcttgtcgatatgactatcgtcttgcaggtcggtgtcttcggtacgggaagaggctacgcggtgataaataccataaaaaccgactgcaacgctgatcaccaccgccacgacggttaaggcatcgaggaacgcggagaggaacgcagccgccacgcaaaaagagagcgacagcagcattttggagcgaatgcttaacagcaaacgggtaaatatgaacagcaacagctgtttcataaaatagatacccgccaccataaacatcagtaacagcaagacttcaagatttgccgccacctcttcacggacgtgttccgcgctggtcatgccgatgaataccgcttcgatagccaacagaccaccggggagcagcgggtagcatttcagggccatcgccagagtgaaaataaattccgctaccagcaaccagcccgcgacgaaagggctgatgaggaaaattaacgggtttacgattaagaaaatgatgagggcgagtttgtaccagtcgggggactggcccaaaaaattgcgccatagcgcgcggccccaggagatctccatgatggtttcccttaccttacaaataatcaatgatgtttttatgtttaaacgcaaagcttaacggtcaggcaggagtgaggcaagtcttgatagtcaaggggaaagagatgcggaaaatgaagccttgatccctttttcttctttttgtctgctatcagcgtagttagccctctggtatgatgagtccaactttgttttgctgtgttatggaaatctcactatggtcattaaggcgcaaagcccggcgggtttcgcggaagagtacattattgaaagtatctggaataaccgcttccctcccgggactattttgcccgcagaacgtgaactttcagaattaattggcgtaacgcgtactacgttacgtgaagtgttacagcgtctggcacgagatggctggttgaccattcaacatggcaagccgacgaaggtgaataatttctgggaaacttccggtttaaatatccttgaaacactggcgcgactggatcacgaaagtgtgccgcagcttattgataatttgctgtcggtgcgtaccaatatttccactatttttattcgcaccgcgtttcgtcagcatcccgataaagcgcaggaagtgctggctaccgctaatgaagtggccgatcacgccgatgcctttgccgagctggattacaacatattccgcggcctggcgtttgcttccggcaacccgatttacggtctgattcttaacgggatgaaagggctgtatacgcgtattggtcgtcactatttcgccaatccggaagcgcgcagtctggcgctgggcttctaccacaaactgtcggcgttgtgcagtgaaggcgcgcacgatcaggtgtacgaaacagtgcgtcgctatgggcatgagagtggcgagatttggcaccggatgcagaaaaatctgccgggtgatttagccattcaggggcgataatcccttccgtttaaagagcaaacccctcaaacgaggggttttttgttgtttttacagatttcccattcttggcgggcaacgttccagcaactcgatgctgccgtcttcgttttgctgttcgagcatcacatcaaatccccacaggcgatgcacatgcttcaggacttctttgcgcccccgatccagcggtgcgcgattatgtggaatataacgcagcgtcagcgaacggtcgccgcgcaaatccacgttccagatctgaatattcggctccagattacttaagttatattgcgacgataaccggttacggatctcccgataaccttcttcattatgaatagcggaaatctccagataattatgccgatcgtcatccagcacggtgaagaagcggaaatcacgcatcactttcggtgacaggaactggctgataaaactctcatctttgaaatcacgcatcgcgaaatgcagcgtttccagccagtcggaaccggcgatatccgggaaccagtatttgtcttcttccgttggcgactgacaaatccgtttaatatcctggaacatggcgaacccgagggcatacgggttgatgccgctgtaccacgggctgttataggggggctggaagaccacattggtgtggctgtgcaaaaactccagcataaaacgttccgttactttcccttcatcatacagatggttaaggatggtgtagtgccagaaggtcgcccagccttcgttcatcacctgagtctgtttttgcggataaaaatactggctcaccttacgcacaatacgcaggatttcacgctgccatgattccagcagtggcgcatttttctccataaaatagagcaggttttcttgtggttcggacggatagcggcgcgcttcagcaaccgttttctcttcctcgcgcttcggcagggtacgccagagcatattgacctgactttgcagatactcttcgcgacttttctgccgggctttctcttcttgcagcgagattttttgcgggcgtttgtaccggtccacgccgtagttcatcagcgcgtggcacgagtccagaagccgttctacttcatcaacgccataacgctcttcgcactcggtaatatatttacgggcaaaaatcagataatcgacaatcgaactggcgtcggtccagctacggaataagtaattgtttttgaagaaagagttatgcccatagcaggcatgagccatcaccagcgcttgcatggtaatggtgttctcttccatcaggtaagcgatacacgggttagagttaatgacgatttcataggccagtccttgctgaccgtgcttatacagccgttcagtctcgataaactttttaccgaatgaccagtgcggatagttaattggcatgccgacgctggagtaggcatccatcatctgttctgaggttatcacttcaatctggtgcgggtaggtatccagccggtagagtttcgccacccggtctatctctgccagataaacatccagcaggtcgaacgtccagtcgggtccatcgctcaaacgtgtggtgtccttattcatagaatcgatcgtcgccatacgcgcacctcattgttgtcggcgctctctgtgtggagcacctcatttcaagcatagaacacctgttaaaaaccgcgtcgccggagaatttttttctttgcgatttcttattatcagagtgccactaatccgcttctgaacggaattttatgctggataaaaagggcgttcagcaggagatactaaagacgccatattgccgcagagtcagggagatgtgagccagctcaccataaaaaagccgcatgttgaataatattttcaactgagttatcaagatgtgattagattattattcttttactgtatctaccgttatcggagtggctatgcgagttgtcatactgggaagtggtgtggtaggcgttgccagcgcctggtacttaaatcaggcaggacatgaggtcaccgtcattgatcgggagccgggggccgccctggaaaccagtgccgcgaatgccgggcaaatctcccccggatatgctgcaccgtgggcggcaccaggtgtgcctttaaaagcgattaaatggatgttccagcgccatgcgccgctggcggttcgtctcgacggtacgcagttccagttgaaatggatgtggcaaatgttacgtaactgcgacaccagccactacatggaaaacaaagggcggatggtgcgtctggcggaatacagccgtgattgcctgaaagcattgcgcgccgaaaccaatattcagtatgaagggcgtcagggtgggacgctgcaactgttccgtaccgaacaacagtatgaaaatgcgacccgcgatatcgccgtgctggaagatgccggcgtaccgtatcagctgctggaatccagccgcctggcggaagtggagcccgcgctggcagaagtggcgcacaaactgacgggcggcctgcagttacccaatgatgaaaccggagactgtcagctatttacccagaatctggcgcggatggcggagcaggcgggggttaaattccgctttaatacgcccgttgaccaactgctttgcgacggcgagcaaatctacggcgtgaagtgtggcgatgaagtgattaaggccgatgcgtatgtgatggcgtttggttcttactcgacggcgatgctcaaaggcattgttgatattccggtgtatccgctgaaaggctactcgctgaccattccaattgcgcaggaagatggtgcgccggtatccaccattcttgatgaaacctacaaaatcgccattacccgtttcgataaccgcattcgtgttggcggaatggcggagattgttggttttaataccgagctgttgcaaccgcgtcgtgaaacgctggagatggtggttcgcgatctctatccacgcggcggtcatgtcgagcaggcgactttctggactggtctgcgcccgatgacgccagacggcacgccggttgtcgggcgtacacgctttaaaaatctgtggctgaataccggtcacggcacgctcggctggacgatggcttgcggttccggtcagttgttaagcgatctgctctctggtcgcacgccagcgatcccatatgaggatctaagcgtagcgcgctacagccgtggatttacgccatcacgtccgggccatttacatggcgcacacagctaaggaaacgagatgacccgtccgatacaggccagcctcgatctgcaggcattaaaacagaatctgtccattgtccgccaggccgcgacgcacgcgcgcgtctggtcggtggtaaaagcgaacgcttacgggcatggtattgagcgtatctggagcgcgatcggggccaccgatggctttgcattgcttaacctggaagaggcaataacgttacgtgagcgcggctggaaaggaccgatcctgatgctggaaggatttttccatgctcaggatctggagatttatgaccagcaccgcctgaccacctgcgtacacagcaactggcagctcaaagcactgcaaaatgcgcggctaaaagcaccgttggatatttatcttaaagtgaacagtgggatgaatcggttgggcttccagcccgatcgcgtgcttaccgtctggcagcagttgcgggcaatggcgaatgttggcgaaatgaccctgatgtcgcattttgccgaagcggaacatcctgatggaatttccggcgcgatggcgcgtattgagcaggcggcggaggggctggagtgtcggcgttcgttgtccaattcggcggcgactctgtggcacccggaagcgcattttgactgggttcggcctggcattattttgtatggcgcttcgccgtccggtcagtggcgtgatatcgccaataccggattacgtccggtgatgacgctaagcagtgagattattggtgtccagacgctaaaagcgggcgagcgtgtgggctacggcggtcgctatactgcgcgcgatgaacagcgaatcggcattgtcgccgcagggtacgccgacggttatccgcgccacgcgcctaccggtacccctgttttagtggacggcgtgcgcaccatgacggtggggaccgtctcgatggatatgctagcggtcgatttaacgccttgcccgcaggcgggtattggtacgccggttgagctgtggggcaaggagatcaaaattgatgatgtcgccgccgctgccggaacggtgggctatgagttgatgtgcgcgctggcgctacgcgtcccggttgtgacggtgtaacttgttgtaagccggatcggaggcaacgtcttctgggtgcaaaaaaatcatccatccggctggtcagcaactgtagttgttaatgtgacagagccattgcccatgatagtgtccattaaaaggatggacactatttccccggaacctgaactcaccgcacaggcgttctacataaaacgcttacgcttcattgttgactcgaactcgacttcagataaatcacgctttacccttgatggagcctgtacatagatttgtgtaattgcctgattttgatatgttcaattcaacatcaaatgaaggttaaattatggacgacaaacaattgcaggctcaggctgcgttcagcaaagcatcgcaaccggcgatagatgcttcattaaatttaagattcagcttcctcttcagccacccgtacgccaatcttcaacacttcattatcttctttctcggccaccgtccagatcatcccggcaaactctacctggtcaccgacaaccggtgccgcgcctaacaactgctggacaatttcacccagcgtttgctgcttatcacgatattctcgcccgtcttccaggccatatatcagcgcaacatcagcatatttggcgctggcttcgagaatgaagtcaccaaagaagcgttgatccagcgcgaccggcggcgactggctgaacagtttaccgagcgccggaagatcgcgttcccgaccaattacacacaacacatcgccttcgcgcagtcgggtgctgccggtaggatgaagcaactggttatcacgaaacagtgccgcaatacgcgtctcttttggcatatgcaaatcgcgcagtgccgcgcccacgcaccatttatcggcactcaattgataaacaaactgctcccacggattttccggatgaatatccaggccaacgcgtgacaccggacgtcccactggcggaaccaccactttggcttttttagccgcccacgagagtgatgttccctgcaagagcagtgaaaccagaaccacaaagaaggcgacattaaagaacagacgtgcattctccagccccgccatcatcgggaacacggccaggatgattggcaccgcgccgcgtaatcctacccagctgataaacacgcgctcacgcagattgaaaccgcggaaggggagcaatccagcaaataccgaaaggggacgggcgaagaatatcatccatgcggacaaaatgagcgccggaatggcaataggcagcagatcgcttgggttaaccaacagccccagcaccaggaacatggcgatttgcgccagccaggcgaggccgtcgaaattttgcaggatgccgtagcggttgcgaatagggcgattacccagcagaaaaccgcacagatacaccgccagaataccgctaccttccagcgcagtagttaatgagaaaatcagaataccgccacttaatgccagcaatggatataatccggcgggcagggcgatgcggttgatcatttgcagtagtaaataaccgccgccaagacctattacaatgcccagaccaaattgttgcagaatatcgacaatgaacatccagctaatattgctctcatgatgctggatcatcgcaattagggtaatcgtcagaaagaccgccattggatcattactgccggattcaatttccagcgtcgagccaacacgttcgttaagccccttaccacccagcagagaaaagaccgctgcagcatcggtagagccgacgatagcgccgattaataagccttcaatcaaatcaagattaaacagccacgccgccatcatgccggttaaaccagaggtgataagcacgcccagcgtcgccagcgacagtgccggtcctaacgccacacgaaaggaactggcctgagtgcgcatcccgccgtcgagcaaaataatcgccagtgccaggttacttaccatgtaggcgaaggggtaattatcaaacgggataccgccgacgccatcgactcctgccagcatgccgatcgccagaaaaataaccagaataggaatgccaagacgggaagaaaatgaactaagtaatatactgctggtgacaaggatggatcctaagatgaaaaggctaattattgttgtggcatccaacggtcggttactcctgattacgctgtctcttatataaaccctaccatattagcggcagagacagcgttttacttagccctgaagcgtgatttttttacattttaagaacaggatgaccgctaatcgtcaactgagtgccttcccgggtgttattcagaatggcatgtgcgcccaacggcagcgtaaccgtgcgttgttcatgaccaaaatcgaggccggtaatgagtggaatcgacaggcgggaacgcaaaaacgcgtacactgactccaggttgtaacctgcgtcataatcattgggcgtgctgccgctaaagctaccgagaataatcgccttctgacgtggcaaaattcccgcatgatagagctgcaacagcatacgttcgacccggaaagggtgctcgttaatatcttccagcaccagaataccgttctcaatttttggcatccacggtgtaccgatcagtgaaatcagcatcgcaagattgcctccccacaacgtgccttcggcccgacatgtcgggccttccccttgccattcaatggtgaaggtttcattgcgtaacgccagccagaaatggtgctcggtaaaggcgttcagttcatccgcgccaaagtttgctaccagcatggggccgctaaaggtgatgacattgccatgcgccagaagaccgcactgaatggcggtaaaatcgctatgtccgcaaatgagcaacgggtcatgttgttggcgagccaccagtgcctgccagtcaatatctgccagtaaacgactggcaccgtaaccgccgcgtacagccagcacgatggtgttgggggtagtcagtctggcaagggaattgagatcttccagacgctctgtttccgtacccgcaaaacgctcacaacgacgggcaataacctcgacgttattgacttgatgccccgcgtcggtaaggcgctggataccacgcagcgcggcgtgctgtttaatgcagtaacccgatggggcaattaagtgaaacagagacatggcaattccttgctgacaacagaaacgaaatgtatatcatgccgcttaggtgtgccgttgtcacctcaacggcgattccaggctataaggatagaagaagtgaaattgagatggtttgcctttttgattgtgttattagcgggttgttcatcaaagcatgactatacgaacccgccgtggaacgcgaaagttccggtgcaacgtgcgatgcagtggatgccaataagccagaaagccggtgcagcctggggcgtcgatccacaattgatcacggcgattatcgctatcgaatcgggtggtaatccgaacgcggtgagtaaatcgaatgccattggtttgatgcagttaaaagcttcaacctccggacgtgatgtttatcgccgtatgggctggagtggtgagccgacgaccagcgagctgaaaaatccagagcgtaatatttcaatgggggcggcttacctgaatattctggaaaccggcccgctggcaggcattgaagatccgaaggtactgcaatatgcgctggtggtgtcatacgctaacggggcaggtgcgctgctacggactttctcgtcagatcggaaaaaggcgatcagcaaaatcaacgatttggatgctgacgagttcctcgaacacgtagcgcgaaatcaccctgcgccgcaggctccgcgctatatctacaaacttgagcaggcactggacgcgatgtaaatcagtcgcgcactttgtccgctttttcccgggcttctcgctcgagagagaaaataatccgctgtaattgccgctccaccgtcgggctgacgttaagaaaacggaagctcagacggggagtggtgatggtttcattcttgccatcaatcactttgcgctcgctgatggagattaactgggcgtcaaagtgaaaaacaccccattgccccatgttgacttcaatctgagcgaagcgcatgccttcttgtaattcggcaggctttgctgtttccagtaatgcgcccatgccgcctaacgacaaatcatacaggcggaaacgtaacgtactgttatccgccagtttggtctggcaaaaataaggcggatggagtggggcggagatgcggaaatatcggcgtcgttgtacaaaccataaggtgggaggcggtacggtaataaatgccggaagctgcaagtattcactctgctgtagttgttcaacagtaaactcgactttcgcaccctgagtttcggcggtaatggtaatgtgctgtgcctttagcacggcgatgttgtcttcggcttgactgccgaaatccagcaccagtttatccggggttattgccagtaatttgctgatcagctgcccgccattccaactgagacgcaaaggaattgcggctttgtgcaaatcgcgtaacacgcccaggacggctaacggattttgtttcaggaactgctcatggtaatgactcacgcggaaaaactcctgactgacaaactgtctttggtttatcggtcacagttaacaaaacttaatacaaatgcgtgaatattttttacatgttgttcttaaatcagccgacatacgcccagcatcgatcccgcccttgcctatacttagagcgttgatgtaagcatttcttgcgtccgattcatcgaaacgagggcctgaacatgggaattattgcctggattatttttgacctgatagccggcattatcgccaagctaatcatgccggggcgtgatggtggtggatttttcctgacctgtattctcgggatagtcggtgcggtggtcggcggctggctggcgaccatgtttggcattggcggctccatcagtggttttaatctgcacagcttcctggtggcggtggtgggagctattctcgttctgggcatattccgcctcctgcgaagagaataagattttcataaggcggatagcgatacagatgccgctatccgctttcacatcagaacgtatactcgacacctgctttacgggtgaaaaaaatcaatatagcacttcgatatccgataaagtcggttcccggtaacaacaacagaatccttttttaattattgtttcgttgtttttggtgtgattcagaaaataaatattttagacagtagccagtcaggcgttaaaaatggggcggatagtgaggcggttttggctgcgcttattgaacatttagaattgatcaatccttctggcagattaagccaaaatacccgttcggcaatgcttcagttacgcgaagaggaatggtctgaattctttttttggttgctaaattctctggagtgtctggattatgtgattattaatttaactccagaaagcaaaaaaacgttgatgagtgaacaccgtaacaatattcaggtagcaattgatgctttatatagccaacgtcggcgtaaatcgccgggtgatgaaagtgaaacacttacccgtagaaatgacgctatcttcggcaaccacgtatggcaaacatttgcgcaatacttcccgccaggacttgaaaaaccgtctgtgtagaaaaaaccatagctatggtgttatctgccgacaacgccatccggagaagccgaatgacgttgtcggagtaagcgctggttaaggtgtgggttgtgcctctttggttgagggttgcgtcgttgctgacttaacggtcggacgcgtcgccggaacattgtcacacggttgctctttcgggcagatcaaatccagcattttcagcgtcacgccattggtccagccaaagccatcctgtaatggatattcgccaccgccgccccccgttccggtggtgctgacatcatatttttccaccagctttttctcccggtcataggtgtgctgaacattggtcaggaagtgccagctaatgtccatcgccacctctttttgcccgtagttttgtaatccttctgtcgcgacccactgtaacggtgcccagccatttggcgcatcccattgttgcccacttttcaccgacgtggtgttcaggccgccgggttgcagcagatgtgttttcgtcgccgtcgccattttgttggcgcgatctttcgctgccgcattgacgtacagcgggaacagggcggccgcggttaactgattgcgcactttatgacttttcaggtcgtaatcggcataccagccttgttgatcgttccacaggtatttttcgatccctttttgacgggcatttgccagcgtttcgtactggtttgccatcgcgttatctccggcagctttgctggcgcgggcgaggattttttccattttaaacatcaggctgttcagatcgaccggtacgatgctggtggtgcgtaaggtatttaactgctgcgggttgtccatccagcgcgagctgaaatcccagccagacgcagcggcagagcgcaggtcgcggtaaatttcagtggcaggtcgattcggattgcttttggcggtggcaatatcttccacccatgactctggtcgtggcgtatcgcgatcgtcccagtagcggttgagaagggtaccatcctgaagtttgacaacgcgtttttcctgttgtccggcttgcaggttttcaacaccgtccatccagtaagcatattctttttgcatttgcggcaggtattgcttcaacgcggcatcgccttcatgctgcgccagtaactctaccatcagggcaaagaagggcggttgcgagcggcttaaatagtaactgcggttgccgttgggaatatgaccgtaagtgtctatttcatgagcaaaattggccaccatatccgcgactttatcccagtgaccgctttcggcaagtcctaacatggtgaagtaactgtcccagtaatatacctcgcgaaagcgtccgcccggcacgacataaggttccggcagcggtaacagagaatcccatttttcggtgttttcggtagaacgcgttaataccggccaaagtccgtcaatatgttcgcgcagtgactgcccctctggcggaacatatttctcgccttctttcggcagggtgaaattgacgttaacgaaatggcgcagatcaaatccgctctggttttgctgcatccgataatcagcaaggatcatcagcggatcgctgttcggcacggcatcggcaaaggttttttggtccggaaaaagtttggcgttttgcacatcattaaacagcggccctaataaaatatcaggcggctgtggtgttaccggtgtttcttctgcctgcaccgatagcgcagcgaaacacaaaaagatacaggctggaattaacgccattttttgcgggcgagaaggtgcgggggatttcatcaatcattctcctttggcgaaaccgaataaaacggtattcaagtatcagaaaaccttagttcaggatcgcactagctgcatgatcgaaatctcattctgcgaactgtcaggcattttagaaaagggaattaaagggataaataacggcgaaatagagtgatcaaataacgtctgtttattagccagccagcggcgttgggttcgtgattagcgaagaaaaatcatcataaattggtgaaaaatataacaggtagttaaaaaccattagtgctgagtaaattgccggatgacatcagaacgatgccatccgaacagtggcttaaccctgacggttgaaacgttgcgttttaacgtccagcgttagcgtttcttctggttgtatcgcatacagtttctcaccctgctggcaaatccagccaatccccagttcacgggcgattagggcgctgtgggataccggacttccggcgctaaggcagataccttttacaaccgccggatccagttgcagtactgtggaaggataaatgttctccgccagtagaatagttggcgagttaaactgcgggagttcttctttcgtttgggtcaggtggaccagggtgcgatgcagaagatcgtccacatcaatatagcgagcttgtagatattcatcatccagttgctggtattgctggctaagttctttaagaacttgctgccaggcatattctgccgtgcaatgttcatgctgaaggagttcgcttgccgccgccagcagttccggatcatctaacagtgtatggtgaccagaaaagattgcggcaatatcgtcaagcccgctggcttctgctttcgctgttaacgtcatcagatctaataacgtgaagtcaatagcctggcgtaatcgatcttgttcttcttccacggtcagggttgattttgcctgtaccgtacataaaactggttgataataaaaggctttacccgaaacaggcggaacgggacgcagagtaggtggagcgacttcctccgtttcaccaaagttatcttcagccagctgacggaaagcgatcagtgcctcttcagcttctggccctttcgcaatcaggcgcagcgtatcgttatagcgaacttgtagtaacgcaatctggttaatactctctggtgtgacgcatttgccgtttttttccagcaacatatcggcattaaatgtcgataaggtataaaccagccgggaggccggacgtacatgcaggccgttacggttttttatgaccaccgccagagaacgggcttcttcatcgtacgcaggacatgtgtcagagatttcagtgtcggaggacggtaaacccagttgttcacgtttggcttccagcgcatgcatggcgtcaaagataactttgtcgatatccgcccccgaggccgcgctgaccgttgctgccagtgtaccttcgaccaacggcgcagcacacaaacgtacttttgcggcgatctcgggagccagcaattccagcgcagtttcagcactcaataatgcgctacccatatccatcatgaccagcacatggtcggcatcagcaacagattcgatggcctccatcactttgacggcatcggtaccaatgggattttgtggatcgtcaattcccgcggcaatggcgattttacaactatcactcattaacatctgacgggctaattcaccgacaccttctcccagtcggctgctatgtgaaactatgaccaggtttaccatcaccaattccttactcttttgcggctaacgccaacatttgcatcataaacatcaccgaggtcgcgccgggatcctggtgaccaatactgcgttcaccgagataactggcgcggcctttgcgggcttgcatcgtaatcgtactttgtgcagcggattcggcgatgctactggcagcttcgagcgccaccggaacagagagattttgctcgctggactgacgtaacgattccaccaccggcacccacacatcacacatggttttatcgccaggttcggctttcccgcgactgattacgccgtccgcgccatcgcggaacatctgataaagctcttccagtgtcaggctttgccgtgcctgggtcgcctgtgcggcgcggataaagaaggtaccgaacagcggaccactggcaccaccgacgctggaaagcagcgtcataccggtattcttgagaatgaaaccgatatctttatctgcgatagcagggagtttttccaccactttgctaaagcctcggttcatatttagcccgtggtcagcatcgccaatttcgcgatccagtccggtaagatactcgctctcggtgctgaaaatatcgccacaacgagtgagccagttaacaatttgagttctgctcagtgacattgctttctccttatttaccccagttaagggccggggtgtggaccggggcgtcccagagtgccagcgtttcgtcatcaactttcagtaaggtgattgagaaaccggtcatatccagtgaggtgcagtacgcgccaattaaattacgttcgatagtcaatcccgcttgctggcaacgtgtggtcaggcggttatagacgccgtacagctcagaaagcggagttgcgccaagattgttaaccagcgcaatcacccgatcgccagactggagcggttgtttggtttgttgttcttcctgccaactgccttgttgataatcccagaaacgcaaagtgcgatggtatgagccatttaccagcagggtgtcgaacatttcatcgacggtttgatcaagggaagagaaggggcggcggtcaatacccggctcaccatgaatgccgacgccaaactccatctcattatccgccagggtaaaagaaggtttgcccgcggcaggaacggtacaggcaccgagagcgatacctattgagtggccttgattattcagcttacgccccagttccgcacaggcgtccagtgagtcgccacgctccgccgctgcgcctacgagtttttcaattaatacggtgttggcaacgccgcgtcgcccggcagtataaagactgtcttttaccgcaacgtcgtcatcaatgaccacagtggtcacttttacgccgctatcgtgcagtaactcggtcgctgtttcaaagttaagaatatcgccggtgtaatttttgataatcaacagtacaccttcgccgccatcaacttgcatggcgcattcaaagattttatcgggcgtcggtgaggtgaaaatttcgcccggacaggcccccgaaagcatcccctgaccgatataaccacagtgcatcggctcgtgtccgctgccgccacccgacagcagggcgacttttcctgcaacaggggcatcagctcgggtgacatacaccggatcctgatgcagtgtcagcgatggatgcgctttcgccagtcctgccagttgttcgtccagtacgtcttgcacatcattgatcaattttttcattattttgctccagcaattacggtagggcatggatgatgttcaacgacacggcgaccactgactgccgatgaatccattgtgcatcaggcaagggaaaagaaaattagcccaaattatgtttcatagtgaaacatatgctttaatgaatgttccatattgaaacttttacgtgtattaatacttaaaattgcgagccggaacaccttttgtcataagggatgcgggatatgagtggcgcttttaacaacgatggtcggggcatatctcccttaattgcaacctcctgggagcgatgcaataagctgatgaaacgggagacatggaacgtaccacatcaggcccagggcgtgacatttgcttctatttatcggcgtaagaaagcgatgctgacgctcgggcaggctgcgctggaagatgcctgggaatatatggcaccgcgagagtgtgcgctgtttatcctcgatgaaaccgcctgcattctcagccgtaatggcgatccgcaaaccttgcagcagctaagtgcactgggattcaatgacggcacgtattgcgccgagggaattattggtacttgtgcgctatcgttagcggctatctctggtcaggccgtgaaaacgatggccgatcaacatttcaaacaggtactctggaactgggccttttgtgcaacgccgttgtttgacagcaagggccgattgacgggaacaatagcgctggcgtgtccggttgagcaaactaccgcagctgatttgccgttgacgttggcaatcgcccgcgaggtcggaaatttactgctgacggacagtttgctcgctgaaactaaccgtcatttaaatcaacttaatgccctgttagaaagtatggatgatggcgtgattagctgggacgagcagggtaatttgcaatttattaatgcccaggcggcgcgggtcttgcgccttgacgcgacggcaagtcagggacgggcaatcactgaactcttaacgttacccgccgtattgcaacaagcaataaaacaggcacatccgctcaaacacgtagaagcaacctttgaaagccagcaccagtttattgatgcggtgataacccttaaaccgataatagaaacgcagggaaccagctttattttgttgctccatcctgtggaacagatgcggcagttgatgaccagtcaattaggaaaagtcagccataccttcgctcatatgccacaggacgatccgcaaacccgccgcttgattcattttggtcgccaggcggcgcgcagtagctttcctgtcctgctttgtggagaagagggcgtgggcaaggcactgctaagtcaggcaattcataatgaaagcgagcgtgctgcaggtccttatatcgccgtcaattgtgagttatatggtgatgctgcgctggcggaagaatttattggtggcgatcgcacggacaatgaaaatggccgtctgagtcggctggaactggcacacggcggcacgctgtttcttgaaaagattgaatatctggcggtggagttacagtctgctttgcttcaggttatcaagcagggggttatcacgcgactggatgcgcggcgtttaataccaattgatgtcaaagtgattgcaacaacgaccgcggacctcgcaatgctggtggaacaaaatcgttttagtcgccagctgtattacgcgctgcatgcatttgaaattaccatcccgcctctgcgtatgcggcgtggcagcattccggcgctggtgaataacaaattacgcagtcttgaaaaacgcttctctacgcggctgaaaattgatgacgatgccctcgctcgcctggtttcttgtgcatggccaggcaacgattttgaactttacagcgtcatcgagaatcttgctctgagtagtgataacgggcgcattcgcgtcagtgatttgccggaacatctgtttaccgagcaggcgacagatgatgtcagcgccacccgcctttccaccagtctgtcatttgcggaagttgaaaaagaggcaattattaacgcagcccaggtcacaggcggtcgcattcaggaaatgtcggctttacttgggatcggccgcactacgctgtggcggaaaatgaagcaacatggcattgatgcagggcagtttaagcgccgggtatgaaagacagaaacgatttctgatacatcagagtgatctgtatttcattccggcgcacgctaacaattttcagcatcgtttaagggcttgtctatcccgcacttaaaagctgaagcgatatcctccgttgacttgcttctgatcaaagaggttaccctgcgtgtaatccgcttcgagatagaatgtgtgctgtttgttatactgtgcactgactcccacgccgttattccagccattacctttgaaactgtacttctcccgggagttgttcaacagatattcggtatcccctgaaaactcgcggatagcgccagtcttcacatagacattcagctggctgttgcctgcggtgatgtcataccccagtatcatgctggcacgccccagcagcgattcgtagtgattcagatgtatattgaggccattactcgccttcatagtcatctcattctggtggctgtatgtaagctgggtttgcggctctatatagaacccataaccagtaggggacaggttgaacctctgcccggcttccagggagatgctcattccattcgcagtgccgttggcgttaacgccgttgttctgactgtccagtacgtggaaactatttttctggcgcgatgcttttataacgagatcgctgtaaaaaccgttttgtgccatgtaactggcgtacattcccatgtagtctgaacgtgcggtaccgtcgcctccgctatagtccggcgatgcatgtgttgagccaatatacagaccgacatacaacggcattacatcagagagacgtttatccccaccaaactggataccgctgtaacccatgtcaaagccgctcagtttgccactggcaaaggagtccaggcttcccccataactgcgcaaccagatattaccgtctttactctgatttcgcaggtcacccatccgttgcatcagcgtacggttttcaacatagttcaataagtaaccgacattgagataattgccgccagcatctgcggtcgtggtgggtttaggcgtgggagcgggttcaggcgtaggatcggggttgactatgggaggctgagcgggagctggtgtgggttcaggattaggagtcggttccggaactgtcccggaagcgtaaagctcccagttagtgccatttttacgcacatcgtacagatatccccccaactcaacctgagaagacgcgctgaacgaggccgcgccgtcagtggtttttaccactgtcagaacttcatttcccgttgtggcctcgctgccctggttgcggatagccaatacgtgattaccagcactactcccgctgatattcaataaatcccctttattattaacgccattaccctcgccaacaacatcagcacgcataataaaggtactgttaccgctcaggttctctacgtttaatgtggcaaatgtgccggcagttgacccgtggctggcaaaatcgacagttgaatggctcagcgccagcgtgtcgagattagaattacttgttacgttccagacgctgttattcattgcaacgtccagttttccgccattgacattatcgctgagggaggaacctgtccaaaccgacccagggtgcatatccagattgattagcccacctttggaaagaacgctaccgttgataagcatacgacccgaggcgttgatgcggctggcggcataaccatcgtcatgttgcgttgcgatggccatctggtcgggtgtactcatatcaatgaccagatcgctcgtgaggtcgatctggctgttggtcatggcataaattcccctggctcctgccgcgccggtgatagccaaactgtctccggttattctaccgccgctgagagcccacaaacccagcgccagactgccattacgatcaactgtaatatcggtattttgcatgttgacaacagccgttgccgtctgggccgaggcaccataagaaccgccggaaaagatgctgtttcgttgcgctgccgtgccagtaaaattgattatcgcgtctgaaccactggtgacgaggccaccgccctgcgcggaagaaatatggctatctgcaccgatagtggttgtaccaccacgaacttcgacgccattggccgcggctccagttacatcaacagtgagtgcattcgcgctaacctggccaaagctccagaggccgtgagcattatcgccattggttttaatggtactgtttgttccgagatcgacaacagagtttttctgtacgtttatccccatggcgctgtagccctgaacatcgattgtcaggtctgtagccgtaaaacgcgcagcaccattggcgttattgccgttgagaccaccgatataaacacctgtacttccatcggtcgtgattttacttccgcttccaagatcgacactggtgccatagtcattgatggttaggcctataccgttcgagttttcaatggtgaattgagtggctgttagtgttgagctatgcccaataatgatgccgtcatcgttactcttaatggtgctgcctgtgcctaagtcagcatgggtatagtcaccaattaagttaatgccgatggcagaggtttgaccaacaacatctactgtgagtcggttagctgtcagggagctgtttttgccctgaataatgattccttttgcatatccagaggcgtcgttgacattgacggtgacatcattacccaggttgatattgccaggcgtgtttcctgctggggtcattacaccatagaggtttcctgatggatcggcggtatctcctgtaattctgtcaccatcattaatagtaatattggtgccatattgacttcctgtatcagcagctatcagcaggggggaaaagataattgcattcaaaccaatagcgccaaattttatcagttgaattgagggcgaacggatttttaattcagcgagacgatctgctttggtattcccattgtgttgtttgatgcccataccactcctatatagtacccagactatgggtctatggattttgtcattttgtttaaatcaatgaataatatcctcttatcatcatgatatttgtatggtgcaatcatgatgagcttctcagagaataattctctattaccgggcaaaatcaggaacacaggaattaatatatatttaacatcccccttacaaaggtgagtttatatcgagttattccctaagttgtcgttacttattccaattcgttactataaatatggcaaaaatattacaacaaacagcggttaaaaaatttggtgaagattttttgtaataatcctaattagttatgggaatttcgcttgatgtatctgcataacaaaaacaatatgcgccatttttgcattactaataagaaaaagcaaaaaacatcgatattcatttttggtcaatgggttttctggcctatcgttgttattgtgctactggttatcattttcatcttgccagcatattggagcgtgatcaattttgatcagctgtgaagggggctgatgtgtagtgatacaaaaacttacgttatatcactgctaatgagatatccggcatctgaacacttatgtctttaattattctcgtggttcactataggcaataagcacaaaagtgtaggatgttacaagaatgattaggactcggtgaaatgaaaaatccacgcaattgcgtggattttatatacttttgcgctcttcatgagatttagcgaaacctcatgagacaataaattaattagacgttgaaaaggaagttcatcacatcgccatctttcacgatgtaatctttaccttctgcacgcattttgcctgcttctttcgcgccttgttcacctttgtaagtgatgaaatcttcaaacgagatggtttgtgcacggataaagcctttttcaaaatcagtatggattttgcccgctgcctgcggcgcggttgctccaaccggaatggtccatgcacgcacttctttcaccccagcggtgaagtaagtttgcaggttcagcagtttataaccggcacggatcacacggttcaggcccggctcttccagcccaagctcctgcataaactcgtcacgttcttcgtcgtccagttcggcaatgtctgcttcaacagcagcacaaaccggaaccacaacagaaccttctttcgccgcgatttcacgcacctggtcaagatatgggttgttttcaaaaccgtcttcgttgacgttggcgatgtacattgttggtttcagcgtcaggaagctcaggtaacgaatagccgctttctcttcagcgcttaaatccagcgcgcgcagcatacctgcattttccaactggggcaggcatttttccaggaccgccagctcagctttcgcgtctttatcgccacctttggctttcttctgtacgcgatgaatcgcacgttcgcaggtgtcgaggtctgccagcgccagttcggtgttgataacttcaatatcgtcagccgggttaactttgccggaaacgtgaatgatgttgtcattttcaaagcagcgaacaacgtgaccgatcgcttcggtttcacggatgttggtcaggaactggttacccagaccttcgcctttcgatgcgccttttaccagaccggcgatatcgacaaattccatggtcgtgggaagcgtacgctgcggttttacgatttcagccagttgatccaggcgaggatcaggcattggtacgacgcctgtgttcggctcaatggtgcagaatggaaagttggccgcttcaataccggctttggtcagcgcgttgaacagggtagatttcccgacgttgggcaaaccgacgataccgcatttgaatcccatgatttaaatcaccttaatatcttaataatcaacctgttattgctaacagattgcagaaatggaaataactttgcctattatacacggcactcggcaaaaatgccgcagacaacgacttattgcgctttaaaggcgtgcaatcggttcgttgctttggtcaagccatctgtaaaccacatttcagtacaacgcgccgcttcgtcaatggcttcatcaattaacttctgttcactaacaggcggtttgcctaacacaaaaccgacaactttatttttatcgcccggatgaccgattccgatgcgtaaacggtgaaagttagggttattacccaatttactgatgatgtctttcagtccattgtgaccaccatggccaccgcccaatttaaatttggcgacgccaggaggcagatccagttcgtcgtgggccaccagaatttcgtccggattaatgcggaaaaaactggccatcgccgcaacggctttgccgctgagattcataaatgtagtcgggactaacaggcggacatcttcgcctccaagagtgactcgcgaagtataaccaaagaatttagcctcttcgcgcagcggagcgcgcaaacgctctgccagtaagtcaacgaaccaggcaccagcattatgtcgcgttgcggcgtattcagcaccggggttcgccaggccgacaatcaatttaatcgtcacgtttttttgtcctgagtgtgtacataactggcgcgtagtttactggttgcggccccgcttgacaaaaaactgcgtatcaaatgcagataacgtaataattgcctgagtggactattagaaagtcaaggtgttcaggcgtttatttgtaaagttttgttgaaataagggttgtaattgtgatcacgcccgcacataacccactgggtgttgtctatactttacacataaggaagaggggtattccctgttacaacccagaaagttccggaggtgacatatgaaacgcaaaaacgcttcgttactcggtaacgtgctcatggggttgggtctggtggtaatggtggtcggcgtggggtattcaatcctcaaccagttaccacagtttaatatgccccagtatttcgcacatggtgcagtgctaagtattttcgtcggtgccattctctggctggcgggtgcccgtgttggcgggcatgaacaggtgtgcgaccgttactggtgggttcgccactatgacaaacgttgccgccgtagcgataatcgccgtcatagctaacaaataatgcagtttgctgaccagtcagtttgcgctgactggtcaatctcgtacttataaatccgccatcgccgcgcgacgattcgggaagaacgccaggcgtcccgggatcggttgaatgccagcgcgagccatagtgcgcagtggctggaattccacgttgcacacgcgcagttcacatccctcgggcagacgcttcacaaaacgctggaacgcatcaagaccaccagcatcaagtaccggaacggcatcccacttcagaatcacaatccgtttgccttcaagacgtgactccaggtccgtgaataagccttcagcagcagcaaaaaacagcgggccaataacgcgcagaaccaggacatcgtctggaacatctacgactaccggtgccaggcgagtcatacgtgcgatacgacgcataaacagcagcgatgccagcacgatccccacgctgatggcaataaccatatcaaacaacacggtcagcgacatgcacagcagcatgacgatgatgtcatctttcggcgcatgacgcagcaagtcgaccactttgtgcgcttcactcatgttccacgccaccatcaacagcagggctgccatggcggaaagcggcagccaggagagcagcggtgccagtaccagcagggcaagaataaccagaatagagtggatcaccgccgagataggggacgttgccccggcacggacgttagcggcagaacgcgcgatggcagctgtagcggtaataccaccaaagaacggagcgataatattccccagtccctgtccaaccagttcgctgttcgccttgtgtttcgtcccggtcataccatccagcaccacggcgcagagcagagattcgattgcgccgagcattgccattgagaatgccgcaggcagcagtgtgcgaatagaatcccaggttagcgtgaattctgaattaggcagatcccacggcagcaccagttgcggcagcagttgcggaataccgttaccctgagaaccatcggccaggacgtagtggaattgcgaaccgatggtagcaacatgtccgccgagcaggttaacaatccccatcaccgcgcaaccagccagcaaggccggaaggtgaccgggtaaacgaatgcccagacgcggccaaaaaacaagaatacctagcgtcacaatgccaatggcagcatcacccacattaatggtcggcagcgccataaataatgcgccgactttttgtagataatgttccgggacatgggccatttgcagaccgagaaaatctttaatctgcatggtaccgatggtgatcccgatacccgaggtgaaacctaaggtgacggaaaccggaatatactcaatcaggcgaccaaagcgtgccagacccatcagaatcaaaaagatccccgacagcaaggtcgcaaccagcagtcctgccagtccaaactgttgcgacacgggatagagaattaccacaaatgccgcagtcggaccggaaacgctaaagcgtgacccacccgtcagagcaatgacaatccccgcaacagctgcggtatataaaccgtactggggtgccacaccactaccaatagccaacgccatcgccagcgggatagcaataatcccgacggttatcccggcaatcaggtcacgggtaaaccgtgcggcagtatatttttctttccagcaagcgtcgatcagagcgcggaaaggcatcacatgtgaggaaaatattttgttcacaataatgtttcatccgtgagcgcatcatctgtcaactaaatggcaggtgaaggaggcataggtcatacaaatggatattacagacaaaaaaacccgccgcagcgggtctttgagccgggttcgattagtgttcgaacatggcagagatcgattcttcgttgctgatacgacgaatcgcttcggccagcatacctgacagggtcagagtacgcacgttcggcagtgatttgatttcatcgctcagcggaatggtatcgcagacaacgacttcatcaattacagagttacgcaggttgttcgccgcgttgccagagaagatcgggtgagtcgcgtacgcaaatacacgtttagcaccacgttctttcagagcttcagcagctttacacagcgtaccgccagtgtcgatcatatcatcgaccagtacgcagtcacgacctgcaacgtcaccgatgatatgcatcacctgtgaaacgttcgcacgcggacgacgtttgtcgatgattgccatatcggtatcgttcagcagcttagcgatagcgcgggcacgcacaacgccgccgatgtccggagaaaccacaattgggttatccagattcagctgcagcatgtcttccagcaggatcgggctaccaaatacgttatcaaccggaacgtcgaagaaaccctgaatctgttcagcgtgcagatccactgtcagcacacggtcaacaccgacgctggagaggaagtctgcaaccactttcgcagtgattggtacacgagcggaacggacgcgacggtcctggcgcgcatagccaaagtaggggataacagcggtgatacgacctgcggaagcacgacgcagggcatcaaccataacgactaattccatcaggttgtcgttagtaggggcacaagtggactggatgatgaaaatatcaccaccgcgtacattttcattaatttgtacgctgacttcgccatcgctaaagcgacctacagcggcgtcgccgagtgaagtgtacaggcggttggcaatacgttgtgctagttccggggtggcgttaccagcaaaaagcttcatatcaggcacgagaagaacctcaggcatgcgtccattggtggaaagaatctgccgaaaactgtgcgggccaggcatgatcctttccaggcggtgtattaaagagcgcgatgcaacgtctggaacaaggtgacgttgtcaccgaaactcagcttgcccggcttaaagcatggctctgtgcaatggggaaagattagcgcctttcgccacaaagccattgagccattccggggcttgctctagcacctggcgggcttcagactctgtatcaaattcagcaaagacacaggcccctgtcccagtcaggcgcgacggggcgtattctaacagccaggaaagcaccgcatcaacctcgcgaaaacgttttcttgcgataacctcgcaatcattgctgaattcacattttagcaacgtttctattgacctttttggcgtattgcgcgggagttcaggatctttaaaaatcaccggagtcggaatacttacaccagggtgcgccaccagataccacttctctggcggatccaccggcgttagtatttcaccaacgccttcggcaaacgcggcatgcccccgaacaaagacaggaacatctgcgcccagcgtcagccccatttccgccagctcatccatgcttagcccgcattgccagagatgatttaatgccaccaggaccgtcgcggcattggatgaaccaccgccgagaccgccgcccatcggcaaacgcttgtcaatgctgatattcgcaccgcttcccgtcggaagacgcccgctgtctgccgcagttttcatcaacaatcgcgctgcgcgaacgatcaggttatcttcatgttccacgccttcaacgggcgttaacagacgaatatccccatcgtcacgaagctcaatgctgatggtgtcgccgtaatcaagaaactgaaacagcgtttgcagcgtgtggtaaccatccgcacgctgaccggtaatgtataaaaacagattaagttttgccggagagggccactgtgtccgcattatttcactatccagttatccatttttaacttgatgcgttgaccaccgtcggtgagttccatattggctggcatcgcaggttgcgttttggtgtcataaccaccataaacaaccttccagtttttgccattctggctgtaggtaatttcgctcaggcggtactggtcgtccagtttgtagtcggttgcatcacccggtaaacctaaaatccactggcgcaagctgttgagcggaattggcattccggtcaatttgccaatcatctcttcggcgtcatcggcggtataacgctgacctttattgtcgactaactgcacgttacccggttgagcattcagctccagttccgtgctgcccaatgggttagtgagcagcagacggtagcgatcctggccggtttgctgccagaaaaagcgggcgtacactttttgttggtcagaaatataagcgaacgcgccgcgagtctgatactgattaagattgcgcacgtcttgctgatgctgacgccattgtggcgaatccgggcttttgccaggacctttgggcgtggtaacggaacaggcagtgagcacaagagcagccagcggtagcaggcggataagacgaaaatcgggcaggggcatagtgatgacaagtccttgagatacgttgcagttataacccttaatgctagcgttaccgtccgctatcgtctatgttcaagttgtcttaattgccagaatctaacggctttcggcaattactccaaaagggggcgctctcttttattgatcttacgcatcctgtatgatgcaagcagactaaccctatcaacgttggtattatttcccgcagacatgacccttttagcactcggtatcaaccataaaacggcacctgtatcgctgcgagaacgtgtatcgttttcgccggataagctcgatcaggcgcttgacagcctgcttgcgcagccgatggtgcagggcggcgtggtgctgtcgacgtgcaaccgcacggaactttatcttagcgttgaagagcaggacaacctgcaagaggcgttaatccgctggctttgcgattatcacaatcttaatgaagaagatctgcgtaaaagcctctactggcatcaggataacgacgcggttagccatttaatgcgtgttgccagcggcctggattcactggttctgggggagccgcagatcctcggtcaggttaaaaaagcgtttgccgattcgcaaaaaggtcatatgaaggccagcgaactggaacgcatgttccagaaatctttctctgtcgcgaaacgcgttcgcactgaaacagatatcggtgccagcgctgtgtctgtcgcttttgcggcttgtacgctggcgcggcagatctttgaatcgctctctacggtcacagtgttgctggtaggcgcgggcgaaactatcgagctggtggcgcgtcatctgcgcgaacacaaagtacagaagatgattatcgccaaccgcactcgcgaacgtgcccaaattctggcagatgaagtcggcgcggaagtgattgccctgagtgatatcgacgaacgtctgcgcgaagccgatatcatcatcagttccaccgccagcccgttaccgattatcgggaaaggcatggtggagcgcgcattaaaaagccgtcgcaaccaaccaatgctgttggtggatattgccgttccgcgcgatgttgagccggaagttggcaaactggcgaatgcttatctttatagcgttgatgatctgcaaagcatcatttcgcacaacctggcgcagcgtaaagccgcagcggttgaggcggaaactattgtcgctcaggaaaccagcgaatttatggcgtggctgcgagcacaaagcgccagcgaaaccattcgcgagtatcgcagccaggcagagcaagttcgcgatgagttaaccgccaaagcgttagcggcccttgagcagggcggcgacgcgcaagccattatgcaggatctggcatggaaactgactaaccgcttgatccatgcgccaacgaaatcacttcaacaggccgcccgtgacggggataacgaacgcctgaatattctgcgcgacagcctcgggctggagtagcagtacatcattttctttttttacagggtgcatttacgcctatgaagccttctatcgttgccaaactggaagccctgcatgaacgccatgaagaagttcaggcgttgctgggtgacgcgcaaactatcgccgaccaggaacgttttcgcgcattatcacgcgaatatgcgcagttaagtgatgtttcgcgctgttttaccgactggcaacaggttcaggaagatatcgaaaccgcacagatgatgctcgatgatcctgaaatgcgtgagatggcgcaggatgaactgcgcgaagctaaagaaaaaagcgagcaactggaacagcaattacaggttctgttactgccaaaagatcctgatgacgaacgtaacgccttcctcgaagtccgagccggaaccggcggcgacgaagcggcgctgttcgcgggcgatctgttccgtatgtacagccgttatgccgaagcccgccgctggcgggtagaaatcatgagcgccagcgagggtgaacatggtggttataaagagatcatcgccaaaattagcggtgatggtgtgtatggtcgtctgaaatttgaatccggcggtcatcgcgtgcaacgtgttcctgctacggaatcgcagggtcgtattcatacttctgcttgtaccgttgcggtaatgccagaactgcctgacgcagaactgccggacatcaacccagcagatttacgcattgatactttccgctcgtcaggggcgggtggtcagcacgttaacaccaccgattcggcaattcgtattactcacttgccgaccgggattgttgttgaatgtcaggacgaacgttcacaacataaaaacaaagctaaagcactttctgttctcggtgctcgcatccacgctgctgaaatggcaaaacgccaacaggccgaagcgtctacccgtcgtaacctgctggggagtggcgatcgcagcgaccgtaaccgtacttacaacttcccgcaggggcgcgttaccgatcaccgcatcaacctgacgctctaccgcctggatgaagtgatggaaggtaagctggatatgctgattgaaccgattatccaggaacatcaggccgaccaactggcggcgttgtccgagcaggaataatggaatatcaacactggttacgtgaagcaataagccaacttcaggcgagcgaaagcccgcggcgtgatgctgaaatcctgctggagcatgttaccggcagagggcgtacttttattctcgcctttggtgaaacgcagctgactgacgaacaatgtcagcaacttgatgcgctactgacacgtcgtcgcgatggtgaacccattgctcatttaaccggggtgcgagaattctggtcgttgccgttatttgtttcgccagcgaccttaattccgcgcccggatacggagtgtctggtggagcaggcactggcgcggttgcctgaacaaccttgccgtattctcgatctcgggacgggtaccggggcgattgcgcttgcgctggctagcgagcgcccggactgcgaaattatcgctgtagatcgtatgcctgatgctgtctccctggcacaacgtaatgcccagcatctggcgatcaaaaatatccacattctgcaaagcgactggtttagcgcgctagccgggcagcagtttgcgatgattgtcagcaatccgccgtatattgacgagcaggaccctcatcttcaacaaggcgatgtccgctttgagccgctcactgcgctggttgcggcagacagtggaatggcagacatcgtgcatatcatcgaacagtcgcgtaacgcgctggtatccggcggctttctgcttctggaacatggctggcagcagggcgaagcggtgcgacaagcatttatcctcgcggggtatcatgacgtcgaaacctgccgtgactatggtgataacgagcgcgtaacgctcggccgctattatcaatgacaagtttttctacactgcttagtgttcatcttattagtatcgcgctttctgttgggctattaaccttacgtttctggctacgttatcagaagcatccacaggcatttgctcgctggacgcgcattgtgccgccggttgtcgatacgctgttactgttaagcggcattgcgttgatggctaaagcgcacatcctgccattttccgggcaggcacagtggctgactgaaaagctgtttggagttatcatttatatcgttttgggttttattgcactcgattatcgtcgtatgcacagtcagcaggcgcgcattattgccttcccgctggcgttggtggtgctgtacatcatcattaaactcgccaccacaaaagtaccgttactggggtaagtcatgagatcgttagctgatttcgaatttaataaagcgccattgtgcgaaggcatgatcctggcttgcgaagcaatccgccgcgattttccctcgcaagatgtttacgacgaactggagcgtctcgttagtctggcgaaggaagaaatcagccagcttctgcctttagaagagcagttggaaaaactgatcgcgctgttttacggcgactggggatttaaagcctcacgcggtgtttatcgtctttccgatgcattatggctggaccaggtgttaaagaatcgacagggcagtgcggtatcattaggtgcggttttattatgggtcgcgaatcgtctcgatttgccgctgctgccggtgattttccctacgcagctgatattgcgcattgaatgtccggatggcgaaatttggctgattaatccttttaacggtgaatcgttaagcgaacatatgctggacgtatggttaaagggaaatatcagcccgtcggcggaactgttttatgaagaccttgatgaagctgataacattgaggtaatccgcaaattgctggatacactcaaagcctcgttgatggaagaaaatcagatggagctggcgttacgcaccagcgaagctttattacaattcaaccctgaagatccctatgaaattcgcgatcgcgggttgatttatgcgcaactggattgcgaacacgttgcgttgaacgatttaagttatttcgttgaacagtgtccggaagacccgatcagcgaaatgatccgtgcgcaaataaataacatcgcgcataaacatattgtgctgcattaattaatcgacattttactcaagattaaggcgatcctatgaaacaaaaagtggttagcattggcgacatcaacgtagcaaatgacctgccgttcgtactgtttggcggtatgaacgtgttggaatctcgcgatctggcgatgcgcatttgcgagcactacgtaactgtgacccagaaactgggtatcccttacgtgttcaaagcctcttttgacaaagccaaccgctcctccatccactcttatcgtggaccgggcctggaagaagggatgaaaatcttccaggagttgaagcagacttttggcgtgaaaattatcaccgacgttcacgaaccaagtcaggcacagcccgttgctgatgtcgtggatgtgattcagttgccggcgtttcttgctcgccagactgacctggttgaagccatggcgaaaaccggtgcggtaattaacgtcaagaaaccacagtttgtcagcccgggacagatgggtaatatcgttgataaattcaaagaaggcggcaacgaaaaagtgattctttgcgatcgcggtgctaacttcggctatgacaacctggttgtcgatatgctgggcttcagcattatgaagaaagtgtctggtaactcgccggtgattttcgacgtgacccacgcactgcaatgccgcgatccgtttggcgcagcttccggtggtcgtcgtgctcaggtggctgagctggcacgagccggtatggcggtaggtctggcggggctgtttattgaagcgcatccggatccggaacatgcgaaatgtgatggtccatccgcgctgccgctggctaaactggaaccgttcctcaagcagatgaaagcgattgatgatctggtgaaaggtttcgaagaactggataccagcaagtaatcttttttgcttgaaaaataaagtattagcgttctgcgttaagacttttttcatgggtgccggatacaaaaaaggccgcaggctgttacccctgcggccggtttcgggcgcatattgccatcacggcagcctgacgcccgttttcaccttacttccggttacgccaccagctgacaatcgctgcggtaataattcccgccaggatcggtgctgccaggtcgtgccagaaaatcatggcaaactgcgcgagcgtcatatagccgccttgttgtaatgacaacattttgcggctattcttgaattgttctggttcaagattagcccccgttctgttgtcaggttgtacctctcaacgtgcgggggttttctctttccagcaaccaatgccaccagggataaagcccccgcaacattgcgcctcaccggataacgccggcttggtgtggatactacgactcaattcatcttcacttcatccctgaaatgtttgcaatgaagagtgcattccggtttttcaacagctgttacagtcatttcatgagtgctctggatgaggcttccagctcgggttgccaatatttacttgtggaagtgataaagacaaaaatggccgcaggctgttacccctgcggccggtttcgggcgcatattgccatcacggcagcctgacgcccgttttcaccttacttccggttacgccaccagccgacaatcgctgcggtaataattcccgccaggatcggtgccgccaggtcgtgccagaaagtcatggcaaactgcgcgagcgtcatatagccgccttgttgtaatgacaacattttgcggctattcttgaagtgtctggtttcaagattagcccccgttctgttgtcaggttttacctctcaacgtgcgggggttttctctttccagcaaccaatgccaccagggataaagcccccgcaacattgcgcctcaccggataattccggcttggtgtggatactacgtctcaattcatcttcacttcatccctgaaatgtttgcaataaagagtacattccggcttttcaacagctgttgcagtcgtttcatgagtgctctggatgatgcttccagctcgggttgccaatatttacttgtggaagagataaagacaaaaatggccgcaggctgttacccctgcggccggtttcgggcgcatattgccatcacggcagcctgacgcccgttttcaccttacttccggttacgccaccagctgacaatcgctgcggtaataattcccgccaggatcggtgctgccaggtcgtgccagaaaatcatggcaaactgcgcgagcgtcatatagccgccttgttgtaatgacaacattttgcggctattcttgaagtgtctggtttcaagattagcccccgttttgttgtcaggttttacctctcaacgtgcgggggttttctctttccagcaaccaatgccaccagggataaagccccgcaacattgcgcctcaccggataacgccggcttggtgtggatactacgtcgcaattcatcttcacttcatccctgaaatgtttgcaatgaagagtacattccggcttttcaacagctgttgcagtggtttcgtgcagggtgtggtacaggctcgcaattctgattaacgacctgtccaggtagtatgaagaaatacaataagcaggaatttatattatctcccccgattaccgtcatcggaggagatataactgtcaggcaaatatcgtcatcaaataggcggcaaacagtgccagatgcgctgcgccattgagcacgttagtacgtccggtggagaaggagatatggcacagcactaaagaggccaccatcaccaccatttctggcgcaccaagtgcaaactgcaattcgttacccgtcataaaggcaattagcgtgacgacaggtacggtaagcgaaatggttgctaacactgaaccaaagaacagattcatcgcgcgctgaacctggttgttcaacactgcttttaatgcacctaaaccttccggcgacagaatcaacagtgccaccaggaagccagtaaaggcgacaggggcattcatgctgtcgagcaatgtctccagcgagctggcgttcattttggtcaccgcaataacggcaatcagatggataatcaaccagatagcatgccacaggctgctatgggcagacggtttaccgtgatgcgggtcgtcatcatcactgtcatcttcgtgctcgtagacaaacaaactttgatgcgttttggtctggatcagcaaaaatacgccatacattgccgcagaaattaatgctaccagtaacgcctgaccggttgaaaaattcgccgcaggcagagccattggaaataccagtacgattatcgccagggggaacagcgcaattaaatactgcttgataccaaacagattcatatattgggtggcaaacttacgaccgcccaacaataatgaaaagccaaccagcccaccggtaacaatcataatgattgaatagagcgtatcacgcattagcgttggcgcggcgtcgccggttgccattaaagctgaaatcaaactgacttcaagaataaccactgaaaggctaagaataagcgaaccgtaaggttctcccaggcgatgggctaatacgtccgcatgacggacaacactaaaggcgctacttaaaataccaataagcgcaagaagattgatggcaatgaccactggtagtgtctggctgcttccccacaggaacagcactaccagcgccagaaccgggaaaataagcgaagtctccttgtggcgggtttttaccgcctcttgagcatttgacattatggttatccctttgcagatgaatttatcgaaaatgtaaaaaataggtaggaaaaataacagaaagtgtctggatatcggtaacattttacgaatttttaccccgctgtcgattttttactcattggggcataaaaataagtattacgtttagacaatgtttgttttagcgtctcttaagaagagtctgacctgaaaattcttatgttttggcaagagtagatattgttgaccacacttaatgttcaactttgtaaaaggagtcaacgatgccgtataaaacgaaaagcgatctgccggaaagcgtaaagcacgttctaccgtctcatgcccaggatatctataaagaagcgttcaacagcgcatgggatcaatataaagataaagaagatcggcgtgatgacgccagtcgcgaagaaaccgcgcataaagtggcctgggctgctgtgaagcatgaatatgccaaaggggatgatgataaatggcataaaaaatcgtaaaaccggtcgcttagttaaagctattcgtgcggtgttgccttgcaagtggtccgtggattgcatattgtcccgttagtggtttcaaaatgagcagtaaaaatgtccggaagacaccaaaaagttgtcgcagggaagtatgcagtggcggaagtgtaaggtgataacgcgtgatttcttgatgaatgccgattgtaaaacggcatttggtgccattgaagaatcactcttatggtcagcagaacaacgggcggcttcgctggcggcgacgctggcttgtcgacctgatgagggaccggtgtggatcttcggctatggatcgttgatgtggaatccggcactggagtttaccgaatcgtgcaccggtacactggttggatggcatcgcgcattttgcctgcgcctgaccgccgggcgcgggactgcgcaccagccgggacggatgcttgcactgaaagagggcggacgcaccacaggcgtcgcctatcgactgccagaagagacgctggagcaggaactaaccctgttgtggaagcgagagatgattaccggctgttatctgccaacctggtgtcagcttgatcttgatgatggacgcacagtaaacgccattgtgtttattatggacccgcgacatccagaatatgaatctgatactcgcgctcaggtcatcgcgccgttgattgcggcggcgagcggtccgctgggaaccaacgcacaatacctgttttcactggaacaggagcttatcaaactgggaatgcaggacgatgggctgaatgatttgctggtatcggtaaaaaaactgctggcggagaattttccggatggtgtgttacgtccgggattcgcctgagtaaacttcccgcatagtggggcgtcagacgccccctcaaacattaaaatgtgagcactttatcggctgacagcgtccattgcgccagttccacaagagtaccgatttccaccccatcaatcagaggaagtgtactaatcccgcgcccgtcggtacaggttttgcacaatttcaccggtacattctgagcggtaaggatctccagcatttgctgaatgttgtagccttcccctggtttttgcccgcgcaacccggctgtgaccgcatcagacatgaggaacagacgcagatccagattgctctcctgctctcgtaacgcaatggccagccgcaagctgttaaacaaggattcgctcccgtaaggtgcgccattggcaacgatcacgattttttgcattatttactcctgtattcagggaattagacactcatcttctatcttactgcttctgcagcgtctgaccaatcggtcacatttttaaggattttcctgaaagcgcgagaaaatacgacaaaagttgccagtaatcgttattctttaaggctatggtttttcattattaccggaagttaccgacgttttgagccgtttcgttcctcgcattatcccgttttatttactcttgcttgtagcaggcggtacagctaacgcacaatctaccttcgagcaaaaagcggcaaatccctttgataataacaatgatggtctgccggatttaggcatggctcccgaaaatcatgatggggaaaaacactttgctgaaattgtgaaagatttcggcgaaaccagtatgaatgataacgggctggatactggcgagcaggcaaaagctttcgcattgggaaaagtccgcgacgcgcttagtcaacaggttaatcagcacgtagagtcctggctatcaccgtggggaaatgccagtgttgacgtcaaagtggataacgaaggacatttcaccggcagtcgtggaagctggtttgtgccgttacaagataatgatcgttatctcacctggagccagcttggtcttactcagcaggataatgggttggtgagcaatgtgggcgttgggcaacgctgggcgcgcggcaactggctggtgggttataacactttttatgacaacttgctggacgaaaatcttcagcgagcgggctttggtgccgaagcgtggggcgaatatttgcgattatcggcaaacttttatcagccgtttgctgcatggcatgaacagacagccacgcaggaacaacggatggcgcgcgggtacgacctgacagctcggatgcgcatgccgttctatcaacacctcaataccagtgtcagcctagaacagtattttggtgatcgtgttgatttgtttaactctggtacgggttatcacaatcccgtcgcgttgagtctgggattaaattacacccctgtgccattagtcactgtgacggcccagcataaacagggtgaaagtggcgaaaatcaaaataacctcgggctgaatcttaattaccgctttggtgtaccgctcaaaaaacaactttctgcgggcgaggttgccgaaagtcagtcgttacgtggtagtcgctatgacaatccgcagcgaaataatctaccgactcttgagtaccgacagcgaaaaacgttaacggtgtttctggcgacaccgccgtgggatctaaaacctggcgaaacagtgccgctgaaattacaaatccgcagtcgttacggtattcggcaactgatttggcagggcgatacgcagatattaagtttgacgccgggcgcacaagccaacagcgcggagggctggacgctgatcatgcctgactggcagaacggggaaggggcaagcaatcactggcgattgtctgtggtggtggaagataaccaggggcagcgtgtctcctccaatgagatcacgctaacgcttgtcgaaccgttcgatgcattgtcaaacgacgaactgcgctgggaaccgtaatcagaaaatgcgctcctgatgcacccataccgctgcttccacgcgagacttgagcttcattttcttcagcatgtgcttgacgtgcacttttactgtgctttcggtgatatccaggcggcgggcaatcatcttgttcggcaaaccctgggcaatcagcttgagaatatcgcgctcgcgtggggttaactggttaacatcgcgctcagtagtggcacggttagcgcgcaagctggcggccagaacaggcgttaatgcttcgcttaataccatttcgccagcagctgcctgatgcaatgctttcagcagatcttccggttccatatcttttaacagatagccatccgcgccgcgtttcagtgcggtgaccacatcttcttcatggttagagacgctgaataccacaatgcgccctgagagggacttttcgcgcagtttatccagcgtttccagaccgttcatgccgggcatattgagatctaacaggatcagatcgggatcaagagactccgccagttcaataccctgttcgccattactcgcttcgccaaccacggtgatatctggtgccatactgataagctgttttacgccagttcgcagcatcgggtgatcgtcaatcagcaggatagtagccggttcctgattactcatgggtatctccttggacgtctgtgaaagttttttcgggaataaaggtgaccaccacttcggtgccacctgattcacgacggcggacgcggcaatcgcctcgtaaactttgcgcacgatcgcgcattattatcatgccgtagtgattgctgcggatggcattttcaggcacgccgcagccgttatcctggacggtcagtttgacctgattatcgttttgcgccaccgtcaccacgacttcactcgcttgcgaatgtttgagggcgttacttaatgcctcacgggcaatttgcaacaagtggattgcctgatgcgaaggcaccaggcgaggcggcaattgataatccagcttcaccgggaagccaaatttggcgctgtactcttcgcaactcgcctccagcgccggacgtaatccaggctcggtgagctgcaagcggaatgtggtgagcaattcacgcaactgcgcccaggatgcattcagttcgttacggatctgacttaacagttcgcggctgctttctggcagcgcatcgccctgcatctgtaaacaactcacctgcatcttcatgcaagagagagattgggcaatagaatcatgcagttcgcgcgcaatggtggcacgctcttccatcacgatcaactgttgctgacgttcctgatggcgatccagcgccagcgtggcggtgagttgttcaaccagggtatccaccagttgttgttgatcatggctaagatgacgcccctgcggcagggtcgccagcaaaataccgtactgcgtatgagagtcagccagccgccacttcagggtcgtgccgcgatcaccaacgggtaatacgccgcgcgggcagagctggcagcctttatcatcacaagtcatatctggctggcaggtaaactcctgatgattctcttcatcatcagtgtcatacacccgcaattcgatatcacgtagcagggttaaattctgtaagccgttgagtacaggtgacaggcgttcacacagcggggcgcgggaatgcaaacggcggttagcctgccataaaaaagagaggatctgatttttatgctccagcccggcggttttctcctgaacccgctgctcaagtacggcataactttcggccagttctgcagacatattgttcaacgcagttccaagcatcgccatttcgttgcgcccgctgatgtttgcgcgttgggtaaaatcgcgatgactgacggcactcgccattgccagcagttgccgccacggttgtagcagtcgcgcccgcaaccagataatagtgaacaccagtaaaagtgccataaataccgccattacccgatggaccagtaccactgtctcgatgcgcatttccgtggtgcggtcaaaaccagataccagttgatcaagcccggcaacaaactggctgacatccgctgacaccgtttctcggttttgtgcacgcatcagcgcagggatcagttcattacgccagtaatcttgtaaaccctgtaattgcgccagttgtccgtctcgttctgctgctcgagtcaactcggcgctaaatgccgtttgttccatctctttaattaagggcttgtctttctcgcttaatggcactgccgccaacagacggtaactttgcatgcgcagcgatcccgctttgttgatcgcatgggcgctgccctgaacgccttgcaccagccagccagaaaccgccatccctgccagtccaatagcagtagaaagcaacacaataagcgcaacctgattaaccagggtgagcggagagagacaacgtttaagcatgtaaacctcttccttcaggctttaaatgagcaataaccttaatgaatgtgacgatacattctggaatggcagtattctcggctattggctgaagtatacccatacccggaaagagttactccttatttgccgtgtggttagtcgctttacatcggtaagggtagggattttacagcaccgtgaaaaatctcataatttttatgaagtcactgtactcactatgggtaatgataaatatcaatgatagataaagttatcttatcgtttgatttacatcaaattgcctttagctacagacactaaggtggcagacatcgaaacgagtatcagaggtgtctatgagtcactcatccgcccccgaaagggctactggagctgtcattacagattggcgaccggaagatcctgcgttctggcaacaacgcggtcaacgtattgccagccgcaacctgtggatttccgttccctgtctgctgctggcgttttgcgtatggatgttgttcagcgctgttgcggtgaacctaccgaaagtcggctttaattttacgaccgatcagctatttatgttgactgcgctgccttcggtttctggcgcgttattacgtgttccatactcctttatggttcctatcttcggtggtcgtcgctggacggcgttcagcaccggtattctgattattccttgcgtctggctgggttttgccgtgcaggatacctccacgccttatagcgtcttcatcatcatctctctgctatgcggctttgctggcgcgaacttcgcatccagtatggcaaacatcagcttcttctttccgaaacagaagcagggtggcgcgctgggtctgaatggtggtctgggaaacatgggcgtcagcgtcatgcagttggttgctccgctggtggtatcactgtcgattttcgcagtatttggtagccagggcgtcaaacagccggatgggactgagctgtatctggcgaatgcgtcctggatatgggtgccgttccttgccatcttcaccattgcggcgtggtttggcatgaacgatcttgctacctcgaaagcctccatcaaggagcagttgccggtactcaaacggggtcatctgtggattatgagcctgctgtatctggcaaccttcggctccttcatcggcttctccgcgggctttgcaatgctgtcaaaaacgcagttcccggatgttcagattctgcaatacgctttcttcgggccgtttattggtgcgctggcgcgttctgcaggtggtgcattatctgaccgtctgggcggaactcgtgtcacgctggtgaactttattctgatggcgattttcagcggcctgctgttcctgaccttaccgactgacgggcagggcggaagcttcatggcgttcttcgcggtcttcctggcgctgttcctgacagctgggctgggtagtggttccactttccagatgatttcagtgatcttccgtaaactgacaatggatcgcgtgaaagcagaagggggttctgacgaacgtgcgatgcgtgaagcggcaaccgacacggcggcggcgctgggtttcatctctgcgattggcgcgattggtggcttctttatcccgaaagcgtttggtagctcgctggcattaacgggttcgccagtcggcgcaatgaaggtatttttgattttctatatcgcctgcgtagtgattacctgggcggtatatggtcggcattctaaaaaataaaccgttactcgtcatacttcgggttacatgtgctgcggctgcgttcattcaccccagtcacttactttagtaagctcctgggattcattcacttgccgccttcctgtaaaccgaattatatagagtaaaatatttgattatcctttgcgcggcatgatgtcgcgctttttttatgcgtcatttagttacaacatactaatgttatatggtttatttcgccggatttcattaagagccattaatatgttacccatggggaatactccttaatacccatctgcataaaaatcttaatagtttaaataactacaggtataaaacgtcttaatttacagtctgttatgtggtggctgttaattatcctaaaggggtatcttaggaatttactttatttttcatccccatcactcttgatcgttatcaattcccacgctgtttcagagcgttaccttgcccttaaacattagcaatgtcgatttatcagagggccgacaggctcccacaggagaaaaccgatgagtaaattcctggaccggtttcgctacttcaaacagaagggtgaaacctttgccgatgggcatggccagcttctcaataccaaccgtgactgggaggatggatatcgccagcgttggcagcatgacaaaatcgtccgctctacccacggggtaaactgcaccggctcctgcagctggaaaatctacgtcaaaaacggtctggtcacctgggaaacccagcagactgactatccgcgtacccgtccggatctgccaaaccatgaacctcgcggctgcccgcgcggtgccagctactcctggtatctttacagtgccaaccgcctgaaatacccgatgatgcgcaaacgcctgatgaaaatgtggcgtgaagcgaaggcgctgcatagcgatccggttgaggcatgggcttctatcattgaagacgccgataaagcgaaaagctttaagcaggcgcgtggacgcggtggatttgttcgttcttcctggcaggaggtgaacgaactgatcgccgcatctaacgtttacaccatcaaaaactacggcccggaccgtgttgctggtttctcgccaattccggcaatgtcgatggtttcttacgcatcgggtgcacgctatctctcgctgattggcggtacttgcttaagcttctacgactggtactgcgacttgcctcctgcgtctccgcaaacctggggcgagcaaactgacgtaccggaatctgctgactggtacaactccagctacatcatcgcctgggggtcaaacgtgccgcagacgcgtaccccggatgctcacttctttactgaagtgcgttacaaagggaccaaaactgttgccgtcacaccagactacgctgaaatcgccaaactgtgcgatctgtggctggcaccgaaacagggcaccgatgcggcaatggcgctggcgatgggccacgtaatgctgcgtgaattccacctcgacaacccaagccagtatttcaccgactatgtgcgtcgctacaccgacatgccgatgctggtgatgctggaagaacgcgacggttactacgctgcaggtcgtatgctgcgcgctgctgatctggttgatgcgctgggccaggaaaacaatccggaatggaaaactgtcgcctttaataccaatggcgaaatggttgcgccgaacggttctattggcttccgctggggcgagaagggcaaatggaatcttgagcagcgcgacggcaaaactggcgaagaaaccgagctgcaactgagcctgctgggtagccaggatgagatcgctgaggtaggcttcccgtactttggtggcgacggcacggaacacttcaacaaagtggaactggaaaacgtgctgctgcacaaactgccggtgaaacgcctgcaactggctgatggcagcaccgccctggtgaccaccgtttatgatctgacgctggcaaactacggtctggaacgtggcctgaacgacgttaactgtgcaaccagctatgacgatgtgaaagcttataccccggcctgggccgagcagattaccggcgtttctcgcagccagattattcgcatcgcccgtgaatttgccgataacgctgataaaacgcacggtcgttcgatgattatcgtcggtgcggggctgaaccactggtatcacctcgatatgaactatcgtggtctgatcaacatgctgattttctgcggctgtgtcggtcagagcgggggcggctgggcgcactatgtaggtcaggaaaaactgcgtccgcaaaccggctggcagccgctggcgtttgcccttgactggcagcgtccggcgcgtcacatgaacagcacttcttatttctataaccactccagccagtggcgttatgaaaccgtcacggcggaagagttgctgtcaccgatggcggacaaatcccgctataccggacacttgatcgactttaacgtccgtgcggaacgcatgggctggctgccgtctgcaccgcagttaggcactaacccgctgactatcgctggcgaagcggaaaaagccgggatgaatccggtggactatacggtgaaatccctgaaagagggttccatccgttttgcggcagaacaaccagaaaacggtaaaaaccacccgcgcaacctgttcatctggcgttctaacctgctcggttcttccggtaaaggtcatgagtttatgctcaagtacctgctggggacggagcacggtatccagggtaaagatctggggcaacagggcggcgtgaagccggaagaagtggactggcaggacaatggtctggaaggcaagctggatctggtggttacgctggacttccgtctgtcgagcacctgtctctattccgacatcattttgccgacggcgacctggtacgaaaaagacgacatgaatacttcggatatgcatccgtttattcacccgctgtctgcggcggtcgatccggcctgggaagcgaaaagcgactgggaaatctacaaagccatcgcgaagaaattctccgaagtgtgcgtcggccatctgggtaaagaaaccgacatcgtcacgctgcctatccagcatgactctgccgctgaactggcgcagccgctggatgtgaaagactggaaaaaaggcgagtgcgacctgatcccaggtaaaaccgcgccacacattatggtcgtagagcgcgattatccggcgacttacgaacgctttacctctatcggcccgctgatggagaaaatcggtaatggcggtaaagggattgcctggaacacccagagcgagatggatctgctgcgtaagctcaactacaccaaagcggaaggtccggcgaaaggccagccgatgctgaacaccgcaattgatgcggcagagatgatcctgacactggcaccggaaaccaacggtcaggtagccgtgaaagcctgggctgccctgagcgaatttaccggtcgtgaccatacgcatctggcgctgaataaagaagacgagaagatccgcttccgcgatattcaggcacagccgcgcaaaattatctccagcccgacctggtctggtctggaagatgaacacgtttcttacaacgccggttacaccaacgttcacgagctgatcccatggcgtacgctctctggtcgtcagcaactgtatcaggatcaccagtggatgcgtgatttcggtgaaagcctgctggtttatcgtccgccgatcgacacccgttcggtgaaagaagtgataggccagaaatccaacggcaaccaggaaaaagcgctcaacttcctgacgccgcaccagaagtggggtatccactccacctacagcgacaacctgctgatgctgactttaggtcgcggtggtccggtggtctggttgagtgaagccgatgccaaagatctgggtatcgccgataacgactggattgaagtcttcaacagcaacggtgctctgactgcccgtgcggttgtcagccagcgtgttccggcagggatgaccatgatgtaccacgcgcaggaacgtatcgttaacctgcctggttcggaaattacccaacagcgtggtggtatccataactcggtcacccgtatcacgccgaaaccgacgcatatgatcggcggctatgcccatctggcatacggctttaactactatggcaccgtaggttctaaccgcgatgagtttgttgtagtgcgtaagatgaagaacattgactggttagatggcgaaggcaatgaccaggtacaggagagcgtaaaatgaaaattcgttcacaagtcggcatggtgctgaatctcgataagtgcatcggctgccacacctgttcagttacctgtaaaaacgtctggaccagccgtgaaggcgtggaatatgcgtggttcaacaacgtggaaaccaagccgggccagggcttcccgactgactgggaaaaccaggaaaaatacaaaggcggctggatccgtaaaatcaacggcaaactgcagccgcgcatgggtaaccgtgccatgctgctgggtaaaatcttcgctaacccgcatctgccggggatcgacgattattacgagccgttcgattttgactatcagaacctgcataccgcgccggaaggcagcaaatcgcagccgattgcccgtccgcgttcgctgattaccggggaacggatggcgaaaatcgaaaaagggccgaactgggaagatgacctgggcggtgagtttgacaaactggcgaaagacaagaacttcgacaacatccagaaggcgatgtatagccagttcgaaaacaccttcatgatgtatttgccgcgcctgtgcgaacactgcctgaacccggcatgtgtggcgacctgcccgagcggtgcgatttacaagcgtgaagaagatggcatcgtcctgatcgaccaggataaatgccgtggctggcgtatgtgcatcactggatgcccgtacaaaaaaatctacttcaactggaagagcggtaagtctgagaagtgcatcttctgctatccgcgtattgaagcgggtcagccgaccgtgtgctcagaaacctgtgtcggtcgtatccgttatcttggcgtgctgttgtacgatgccgacgctattgaacgtgcagccagcaccgagaacgagaaagatctttaccagcgtcagctggacgtgttcctcgatccgaacgatccgaaagtcatcgagcaggcgattaaagacggtattccgctgagcgttattgaagccgcacagcagtcgccggtttataaaatggcaatggaatggaaactggcgctgccgctgcatccggaatatcgcacactgccgatggtctggtacgtgccgcctctgtctccgattcagtctgcagcagacgcgggtgagctgggtagcaacggcattctgccagacgtcgaaagcctgcgtattccggtacagtatctggcgaatctgctgaccgccggtgataccaaaccggtactgcgcgcactgaaacgtatgctggcgatgcgtcattacaaacgtgctgaaaccgttgacggtaaagttgatacccgtgcgctggaagaggtcggtctgaccgaagcccaggcacaggagatgtaccgttatctggcgattgctaactacgaagatcgctttgtggtgccgagtagtcatcgtgaactggcacgggaagccttcccggagaaaaatggctgcggctttacctttggtgatggctgccacggttcagataccaaattcaatctgttcaacagccgtcgtatcgatgccatcgatgtgaccagcaaaacggagccgcatccatgatcgaactcgtgattgtatcgcgtctccttgaatatccggatgctgccttatggcagcatcaacaagagatgtttgaggcgattgccgcgtcgaaaaatctgccaaaagaggatgcccatgcgctgggcattttcctgcgcgatttaacgacgatggatccgctcgatgcccaggcgcagtacagcgaactgttcgaccgtggccgcgccacgtcactgttgctgtttgaacatgtgcacggcgaatcccgcgaccgcggccaggcgatggtggacctgctggcgcagtacgagcagcacggcttgcagttaaacagccgcgaattgccggaccatctgccgctgtatctggagtacctggcgcagctgccgcaaagcgaagccgtggaaggtttgaaagatatcgcgccgattctggcattgctgagcgcgcgtctgcaacagcgtgaaagccgttatgccgtgctgtttgatctgctgctgaaactggcgaataccgctatcgacagcgacaaagtggcggaaaaaattgccgacgaagcgcgcgatgatacgccgcaggcgctggatgctgtctgggaagaagagcaggttaaattctttgctgacaaaggctgcggtgattcagcaatcactgcgcatcagcgtcgctttgccggtgccgtcgcgccgcaatatctgaatatcaccaccggaggacagcactaatgcaattcctgaatatgttcttctttgatatctacccgtacatagccggggcggtcttcctgattggtagctggctgcgttatgactacgggcagtacacctggcgcgcggcgtccagccagatgctggatcgcaaagggatgaacctggcgtcgaacctgttccatatcgggattctggggatttttgtcggtcacttcttcggtatgctgacgccgcactggatgtatgaagcctggctgccgattgaagtgaaacagaaaatggcaatgtttgctggtggtgccagcggcgtgctgtgtctgattggcggcgtgctgttgctgaaacgtcgtctgttcagcccacgcgtgcgtgcaaccactaccggagcggatatcctgatcctgtcgctgctcgttatccagtgcgcgctgggcctgttgaccattccgttctccgctcagcatatggacggtagcgagatgatgaaactggttggctgggcgcagtcggtggtgaccttccacggtggcgcttctcaacacctcgatggtgtggcgtttatcttccgtctgcacctggtgctggggatgacgttattcctgctgttcccgttctcgcgtctgatacacatctggagcgtaccggtggagtatctgacacgtaagtaccagctggtgcgcgctcgtcactaagcgaattttagttcacatagaccctgcttcggcggggtttttttatgggcacggtgcggggtgagttgtcggatgcgcttcgcttatccgacctacaggggaggatattgtaggcccggtaaacgtggtgccatcgggcaaaattagctcggagtaacaggttttgattatttaaggaagcgatggtggtgggggaaggattactcagcgctgcgcgcttcgcccttcgggtcgttgcctgcggcaacgctctctcgctggcgctcaagtcgaaccttggtcgaagcttctcatccttccccgcttgggcagaatatttgattgcggattcgtttgagaattccggggcttttgaaagtgatggtggtgggggaaggattactcagcgctgcgcgcttcgcccttcgggtcgttgcctgcggcaacgctctctcgctgacgctcgagccgaaccttagtcgaagcttctcatccttccccgcatgggcagaatatttgattgcggattcgcttgagagttcagggacttttgaaagtgatggtggtgggggaaggattactcagcgctgcgcgcttcgcccttcgggtcgttgcctgcggcaacgctctctcgctggcgctcgagtcgaaccttggtcgaagcttctcatccttccccgcatgggcagaatatttaattgcggattcgttgggaagttcagggacttttgaaagtgatggtggtgggggaaggattcgaaccttcgaagtcgatgacggcagatttacagtctgctccctttggccgctcgggaaccccaccaggggtaattcaaattttgaggtaatgcttgagatggtggtgggggaaggattattcgtcgcttcgctcctcacccttcgggccgttgcctgtggcaacgttctctcgctttcgctcgaatcgaaccttagtcgaaggttctcacccttccccgatgagtgcaaactttcacaatctcaccgaagttaccacatcgctgtggtgaattatggtggtgggggaaggattcgaaccttcgaagtcgatgacggcagatttacagtctgctccctttggccgctcgggaaccccaccacggggtaatgctttttactggcctgctcccttatcgggaagcggggcgcatcatatcaaatgacgcgccgctgtaaagtgttacgttgagaaaaatgaactggttgcgtaattttcatccgtaacggattaaaggtaaccagttatttttgctggcgattaaagaataatcgttcgattaccgtaaacaaagacgcgctgtgccagtactttgtatagtgcacgacttaagacgtttttctcgacgtcacgacctgcgcgcatcatatcttcagctgtgtaggtatgatcgacatgaataacgtcctgcatgatgattgggccttcgtccagattgtcattcacatagtgagcggttgcgccaataatcttcacaccacgttcataggcctggtgataaggacgtgcgccaataaacgctggcaggaatgaatggtgaatattgatgatcttattcgggaagcgtgccacaaattccggcgttaatacccgcatatacttcgccagcaccacgtagtcaggttgataagcatcaatggcatccgccatcttttgatcgtgctcgttgcgggttaacccttcatggcttaccagctcaaacggaatatcaaaacgctcaaccagagaacgtaaagtatcgtggttaccaataactgccgcgatttcgacatccaggccgccgtaattggctttcatcaacaaatcgccaaggcaatgcgcttctttagtgaccagaatcactatccggcgacgaccggcaggattcagctcacgcacggagccttctggcaatgcgctatcgagatccgccagcagggtggaatcattaaaaatcccttccagttccgtgcgcataaaaaagcgcccggtacggtgatcaacaaattcattgttctgtacgatatttaactcgtgcttgtagcaaatattggtaatacgtgcgatcagacctttttggtccggacaaatagtacgcagaactttacgttggagtgaatgcattgctggaaaaaccttgttgagagtgtttgctaaaccgtaccgtcaaccattattggccgcagcactttttaaattttttacctgaaccacaagggcagggatcgttgcgaccaaactgcggacgtgtaccgtcaatatagtaccattgaccgttttctttcaaaaatcgcgaacgttcaattattgcacctgttttaccaccttcggtaaatcgagcaacaaaactgacaaatccgatattgtcggcgtcctgccaacaatgttcaaatacggtcaatcccaaccattcagtatgcgcaaatccggccatcaattcggcacgtaacgccgctgctccacaagagggatgccaggtctttattaaataatctgcgtcttgcatcacaaaagcgcagtaacgcgaacgcatgagatgttctggatcaggtgcaaccttttcaccagacacataagggtggcaacataggctatactcgacagcactaccacagggacaaagctgagacacaaataatctccctggaaacaataacggcgtattaaccgcctgagtagcactatgttaaccgagcagtagcgatgtggctacgattgcattccaggggaatcttgcgggaataatgagaaagataaaaatagggctggcgctgggatctggcgcggcgagaggttggtcgcatattggcgttattaatgcgctaaaaaaagtgggtattgaaattgatatcgttgcaggatgttcaattggttcgctggtgggcgctgcctatgcatgcgatcgattatctgcgctggaagattgggtgacctctttcagttattgggatgttttacgcctgatggatctctcctggcagcgcggtgggttactgcgcggcgagcgtgtcttcaatcaataccgcgaaataatgccggaaacagagatcgaaaattgttcccgtcgctttgcggctgttgccaccaatttaagtacgggacgtgaattatggtttactgaaggcgatctccatcttgctattcgcgcatcatgcagtattccaggactcatggcacctgttgcacataacggctactggctggttgatggagcagtcgttaacccaattcctatttccctcacgcgtgcattgggggctgatattgtgatagcggttgacctgcagcacgatgctcatttgatgcaacaagatttgctctcctttaatgtcagtgaagaaaatagcgagaatggtgattctctgccgtggcatgcgcgtctgaaagaaaggttaggcagcataacgacacgtcgggcggtgacagcgccaacggcaacagagattatgaccacttctatccaggtgctggagaaccgccttaaaaggaaccgcatggcaggtgatccgcccgatattctgattcaacctgtttgcccgcaaatatctacgcttgatttccatcgcgcgcacgctgccattgcggccggacagctggcagtggaaaggaaaatggacgaacttttgccgttggtacgcaccaacatttgaccagaatttttatctacacttaagttaattctgacaggcgcaggtggcaatagcatgccactattgagtaaagccagtcaggggagagaacatgacgcagccattggtcggaaaacagattctcattgttgaagatgagcaggtatttcgctcgcttctggattcatggttttcctcattgggagcgacaacggtactggcggctgatggggtggatgcccttgagttgctgggaggtttcactccagacctgatgatatgtgatatcgcgatgccacgaatgaacgggcttaaactgctggagcatatacgtaacagaggcgaccagaccccagttctggtgatatctgccactgaaaatatggcagatattgccaaagcgttacgtctgggcgttgaagatgttttgctgaaaccagttaaagatctgaatcgcttgcgcgagatggtttttgcctgtctctatcccagcatgtttaattcgcgcgttgaggaagaggaaaggctttttcgcgactgggatgcaatggttgataaccctgccgcagcggcgaaattattacaggaactacaaccgccggttcagcaggtgatttcccattgccgggttaattatcgtcaattggttgccgcggacaaacccggcctggtgcttgatattgccgcactttcggaaaacgatctggcattttattgccttgatgtcacccgagctggacataatggcgtacttgctgccttgttattacgcgcattgtttaacggattattacaggaacagcttgcacaccaaaatcaacggttgccagagttgggcgcgttattgaagcaggtaaaccatttacttcgtcaggccaatctgccggggcagtttccgctattagttggctattatcatcgcgaactgaaaaatctcattctggtttctgcgggtctgaatgcgacgttaaataccggcgaacaccaggtgcaaatcagtaatggtgttccgttaggcactttaggtaacgcttatttgaatcaattgagccagcgatgcgatgcctggcaatgccaaatatggggaaccggtggtcgactgcgcttgatgttgtctgcagaatgagcaaacgataacgcgggctaaatttgcattacctgctaatgtcggctggtggtactatcgtcgccattcgtataagtaattgtcttaattatgctaactcgcctccttttcagaacttagccccttcggggtgctgatatactgggatgcgatacagaaatatgaacacgttcaaaacacgaacagtccaggagaatttaaatggctgccattaatacgaaagtcaaaaaagccgttatccccgttgcgggattaggaaccaggatgttgccggcgacgaaagccatcccgaaagagatgctgccacttgtcgataagccattaattcaatacgtcgtgaatgaatgtattgcggctggcattactgaaattgtgctggttacacactcatctaaaaactctattgaaaaccactttgataccagttttgaactggaagcaatgctggaaaaacgtgtaaaacgtcaactgcttgatgaagtgcagtctatttgtccaccgcacgtgactattatgcaagttcgtcagggtctggcgaaaggcctgggacacgcggtattgtgtgctcacccggtagtgggtgatgaaccggtagctgttattttgcctgatgttattctggatgaatatgaatccgatttgtcacaggataacctggcagagatgatccgccgctttgatgaaacgggtcatagccagatcatggttgaaccggttgctgatgtgaccgcatatggcgttgtggattgcaaaggcgttgaattagcgccgggtgaaagcgtaccgatggttggtgtggtagaaaaaccgaaagcggatgttgcgccgtctaatctcgctattgtgggtcgttacgtacttagcgcggatatttggccgttgctggcaaaaacccctccgggagctggtgatgaaattcagctcaccgacgcaattgatatgctgatcgaaaaagaaacggtggaagcctatcatatgaaagggaagagccatgactgcggtaataaattaggttacatgcaggccttcgttgaatacggtattcgtcataacacccttggcacggaatttaaagcctggcttgaagaagagatgggcattaagaagtaacatccgtatcggtgttatccacgaaacggcgttgagcaatcgacgccgtttttttatagcttattcttattaaattgtcttaaaccggacaataaaaaatcccgccgctggcgggattttaagcaagtgcaatctacaaaagattattgcttgatcaggaaatcgtcgagggatttaccttgctcatccattgcttttttgattacagctggagtacggccttggccagtccaggttttagtttcgccgttttcgtcaacgtagctatattttgccggacgctgagcacgtttagctttggtgccagatttaacggcagcaaggctattcagcagttcgttcgggtcaataccgtcagcgatcagcatttcgcgatattgctgcagtttacgagtgcgctcttcaacttcagcagcagccgcgctttcttcttcgcgacgttcgttaacaacaacttctaatttttccagcatttcttccagcgtttcaagtgtacattctcttgcctgcgcacgaagagtacggatgttgttcagaattttaagtgcttcgctcattgtagtaatctcaaacttatattggggtggtttgttgaggtaataatagagccttaaattcagttgtgcaatagccaggaatgtaaggaattcaaaattgttctttattttgtgccgccaataaatatcttttcataaaattagccagaaaagacgcggcatatagccctatttacaccgatgatttcgcagcacgtgaggttaaaacttcctgattcatgtcacattttatggggagattatcgtaggctgacgacctttcagtcttctgtattagttgtgtttacgagaattccctattaagcgaatgatgaaaagtagaacagtcgcaataagagcatggacttagtattgcactatctcctggaggtcaacagagggctattacttgcgcaacaggttaaagattgtgaatagttaccagcagtcatttacccgcttataacaagcgaggcagttgtaatgatagctcagaaggattatgcaaggcttcgtaagggagaacgcatatacccacttctgtgcatactgttgagctgaaaaactgacgaattatgataaactccagccaactttatttcatatcattgagggcctgtggctgatggcacagctatatttctactattccgcaatgaatgcgggtaagtctacagcattgttgcaatcttcatacaattaccaggaacgcggcatgcgcactgtcgtatatacggcagaaattgatgatcgctttggtgccgggaaagtcagttcgcgtataggtttgtcatcgcctgcaaaattatttaaccaaaattcatcattatttgatgagattcgtgcggaacatgaacagcaggcaattcattgcgtactggttgatgaatgccagtttttaaccagacaacaagtatatgaattatcggaggttgtcgatcaactcgatatacccgtactttgttatggtttacgtaccgattttcgaggtgaattatttattggcagccaatacttactggcatggtccgacaaactggttgaattaaaaaccatctgtttttgtggccgtaaagcaagcatggtgctgcgtcttgatcaagcaggcagaccttataacgaaggtgagcaggtggtaattggtggtaatgaacgatacgtttctgtatgccgtaaacactataaagaggcgttacaagtcgactcattaacggctattcaggaaaggcatcgccacgattaataagaatttctttactgacagggtgagcagggcacttttatcctgtcagttcgttttacgcacttcttccgggctatatacccttctcggcagttttttaacgccgctatacgcctcacagggctcttaagcaccgacgttgacttgtgacctgtaaagtacaatatccctgtgtttaggcgttatacatcgtcgcaaatatgatgaaggctaatgctgtcggtttatggaaaagttgctttgggtaaacaaaaaatacggccccagaagggcaatgccgttcacttaagaggagcggcactatgtttcacaggataacgggtttttgatatcttaaccgacctcggccttgatggtcgggggcgttttgttatgaacaccacttccagagcaccccgaagatgctccagtcgtttcgggatggtccctggtgacgccgtgtttcccagctctatcatttctgatgcgatattcttccacgcaggcagtagccagtggcggttacaacccttctggttcagcgtcagcagcaggtcttcgctgtaaaaaagtttatcaaacaacgtaatagagttatccgggatggtggcgagcatggagtgggccagcacagtttcgctctgccggtaaggtgcggtcacggcattcagcagaatgtgacttcccaggttcattaaggccaccagacgcataaccgggtaggcgttctgccgcttagtggatgtgttggcagacccataatattcacgcagctcgggtttatcaggtgtcctgaactgtgcgccatcaatggcaaaaagttgcaggccgtgccagtcatccttcaggtaacgttccgcgcccctgtctgtgcggtctggcggaagagccattccactggggcggcccccacgcgctgacgcgcctgggtgacagcgctgcgggccagcaggttcatccccgcttcgccatccgcgctcaggttcagacggcgaacaacatcggtaattggctcattgcaccaccatccagataaccatgtcccccggtaaacgacggcggcgaacggtcgcatgagcagaaagcgtcaggcagtgttgtatccactcggtgggaaggtgttctgcaaatagttgtgcagagggcggaggcataagcggatggtcactgaaatcgagcagatcattgagaagtggcataagaaaacggctccctgttgtggaagccgttatagtgcctcagtttaaggatcggtcaactaatccttaactgatcggcattgcccagaaggggccgtttatgttgccagacagcgctactgattaagcggattttttcgcttttttctcagctttagccggagcagcttctttcttcgctgcagtttcaccttctacataatcacgaccgtagtaggtatccagcagaatctgtttcagctcggagatcagcgggtaacgcgggttagcgccggtgcactggtcatcgaatgcatcttcagacagtttatccacgttcgccaggaagtctgcttcctgaacgccagcttcacggatagatttcggaatacccagttcagctttcagcgtttccagccatgccagcagtttctcgatcttagcagcagtacggtcgcccggtgcgctcagacccaagtggtcggcaatttcagcataacgacggcgagcctgcggacggtcatactggctgaatgcagtctgcttggtcgggttgtcgttcgcattgtagcgaataacgttacaaatcagcagggcgtttgccagaccgtgcggaatatggaactgggaacccagtttgtgcgccattgagtgacatacacccaggaaggcgttcgcaaacgcgatacccgcgatagtcgctgcactgtgaacacgttcacgcgctaccggatttttagacccttcgtggtaggacgctggcagatattctttcagcagtttcagtgcctgcagagcctgaccatcagagaactcagatgccagtacagaaacataagcttccatggcgtgagttactgcgtccagaccaccgaaagcacacagggacttcggcatgtccataaccaggttggcgtcgacaatcgccatatccggagtcagcgcatagtctgccagcggatatttctgaccagtagcgtcgtcagttacaaccgcaaacggagtgacttcagaacctgtaccagaagtggtggtgacagcgatcattttcgctttcacgcccattttcgggaacttgtagatacgtttacggatatccataaagcgcagcgccagctcttcgaagtgagtttccggatgttcgtacataacccacatgatcttcgcggcgtccatcggggaaccaccacccagcgcgataatcacgtctggtttgaaggagtttgccagttctgcacctttacgaacgatgctcagggtcgggtccgcttctacttcgaagaagacttcagtttcaacgcctgctgctttcagtacggaagtgatctgatcagcataaccattgttgaacaggaagcggtcagtcacgatgagcgcacgtttgtggccatcagtaatcacttcatccagcgcgattggcagggagccacggcggaagtagatagatttcggaagtttgtgccacaacatgttttcagctcgcttagcaacggttttcttgttgatcaggtgtttcggaccaacgttttcagagatggagttaccaccccaagaaccacaacccagagtcagggaaggtgcgagtttgaagttatacaggtcaccgataccaccctgagacgctggggtgttaatcaggatacgcgccgttttcattttctgaccgaagtaagaaacgcgagccggttggttatcctggtcagtgtacaggcaagaggtatgaccgataccgcccatagcaaccagtttctctgctttttctaccgcgtcttcgaaatctttagcgcggtacattgccagagtcggggacagtttttcatgtgcgaacggttcgctttcatcaacaacggtcacttcaccgatcagaatcttggtgttttctggtacagagaagcctgccagttcagcaattttataggctggctgaccaacgatagccgcgttcagcgcaccgtttttcaggataacatcctgaacagctttcagctctttaccctgcaacagatagccgccgtgggttgcaaaacgttcacgtacagcgtcataaacagagtcaacaacaacaacagactgttcagaagcacagattacgccgttgtcgaaggttttggacatcagtacagatgcaactgcacgtttgatatcagcagtttcatcgataacaactggagtgttgcccgcgcctacaccgatagctggtttaccggagctgtatgcggctttaaccatgcccggaccaccagtcgcgaggatcaggttgatgtctgggtggtgcatcagtgcgttagacagttcaacagaaggttgatcgatccagccgatcagatctttcggagcaccggcagcgatagcagcctgcagaacgatatcagccgctttgttggtggcatcttttgcacgcgggtgcggggagaagataatggcgttacgggtcttcagactgatcagcgatttgaagatagcagttgaagtcgggttagtggtcggaacgataccgcaaataataccgattggttcagcgatagtgatggtaccaaaagtgtcgtcttcagacagaacaccacaggttttttcatctttataggcgttgtagatatattcagaagcaaagtggtttttgatcactttatcttcgacgatacccatgccggattcggcaacggccattttcgcgagtgggattcgagcatctgcagcagccagagcggcggcgcggaagattttgtctacttgctcttgagtgaaactggcatattcacgctgggctttttttacacgctctacgagtgcgttaagttcagcgacattagtaacagccataatgctctcctgataatgttaaacttttttagtaaatcatctgctcgaatacgagagtatagtcagtgcggtgatgatttgcttaacctatgaaaatcaaaagcttactcgcgctcacactcactgtgatttactaaaagagtttaaacattagagttattatctctaatgcgtcacttccaggtggcgtaagcaagattactcacttctgggtactgattacgtgatccaaatcaaatttttgcaaagctgacacctttcagcatcgcttttcgccattatagctaacagttaataaattgtagtatgatttggtggctacattagcatgttttgcacaactagataacaataacgaatgatagcaattttaagtagttaggaggtgaaaaatgctgtcaaaaggcgtattgtcagcgcgtcttttcaaccttatttatggctaacattatccggcttttgcttcggagctaaccgtgattcagaccttttttgattttcccgtttacttcaaatttttcatcgggttatttgcgctggtcaacccggtagggattattcccgtctttatcagcatgaccagttatcagacagcggcagcgcgaaacaaaactaaccttacagccaacctgtctgtggccattatcttgtggatctcgctttttctcggcgacacgattctacaactttttggtatatcaattgattcgttccgtatcgccgggggtatcctggtggtgacaatagcgatgtcgatgatcagcggcaagcttggcgaggataaacagaacaagcaagaaaaatcagaaaccgcggtacgtgaaagcattggtgtggtgccactggcgttgccgttgatggcggggccaggggcgatcagttctaccatcgtctggggtacgcgttatcacagcattagctatctgtttggtttctttgtggctattgcattgttcgctttatgttgttggggattgttccgcatggcaccgtggctggtacgggttttacgccagaccggcatcaacgtgattacgcgtattatggggctattgctgatggcattggggattgaatttatcgttactggtattaaggggattttccccggcctgcttaattaattcctttcaaatgaaacggagctgccatgctccgtttacttcgtcattatttttactttgttcccgcgcagttatcaaaagcaaaaggaataggtaaaaatattcttctcaaattacagttagttataaggatttccttaactgcttctcctcaccatcatgttattttcgccacatcataatcctgggcttgctgaagaataattgaaatgatattattaattccactgcctttggtagaggaaagtgctaaataataatcaattgttaaattattgtgcatttcactactggaactgtaatcagaaaagatagacatgcttagccaatctctatttgattgaattgaaagatgtttgttaaggcatggatgcaagctatagattctgatacggtcaataaaagagaattgcttaacaattttgcaaaatgtattggcgagtaagaaccgcatttggtactttccgggcaaccgccagacgattctttattggtaatgagaataattaacaattaaagagcgtcgcgaaagaataatgtgtctcgacaggggagacacagtacgaatcgacataaggtgatcgtctgaatcaccagaataaataaagtcggtgatagtaatacgtaacgataaagtaacctgacagcagaaagtctccgagcctgtgcagggtcccaatccgggattacacatgctggttaataccagtaattataatgagggagtccaaaaaacaatgaccaacatcaccaagagaagtttagtagcagctggcgttctggctgcgctaatggcagggaatgtcgcgctggcagctgatgtacccgcaggcgtcacactggcggaaaaacaaacactggtacgtaacaatggttcagaagttcagtcattagatccgcacaaaattgaaggtgttccggagtctaatatcagccgagacctgtttgaaggcttactggtcagcgatcttgacggtcatccagcacctggcgtcgctgaatcctgggataataaagacgcgaaagtctggaccttccatttgcgtaaagatgcgaaatggtctgatggcacgccagtcacagcacaagactttgtgtatagctggcaacgttctgttgatccgaacactgcttctccgtatgccagttatctgcaatatgggcatatcgccggtattgatgaaattcttgaagggaaaaaaccgattaccgatctcggcgtgaaagctattgatgatcacacattagaagtcaccttaagtgaacccgttccgtacttctataaattacttgttcacccatcaacttcaccggtgccaaaagccgctatcgagaaattcggcgaaaaatggacccagcctggtaatatcgtcaccaacggtgcctataccttaaaagattgggtcgtaaacgaacgaatcgttcttgaacgcagcccgacctactggaacaacgcgaaaaccgttattaaccaggtaacctatttgcctattgcttctgaagttaccgatgtcaaccgctaccgtagtggtgaaatcgacatgacgaataacagcatgccgatcgaattgttccagaagctgaaaaaagagatcccggacgaagttcacgttgatccatacctgtgcacttactattacgaaattaacaaccagaaaccgccattcaacgatgtgcgtgtgcgtaccgcactgaaactaggtatggaccgcgatatcattgttaataaagtgaaagcgcagggcaacatgcccgcctatggttacactccaccgtatactgatggcgcaaaattgactcagccagaatggtttggctggagccaggaaaaacgtaacgaagaagcgaaaaaactgctggctgaagcgggttataccgcagacaaaccgttgaccatcaacctgttgtataacacctccgatctgcataaaaagctggcgattgctgcctcttcattgtggaagaaaaacattggtgtaaacgtcaaactggttaaccaggagtggaaaacgttcctcgacacccgtcaccagggtacttttgatgtggcccgtgcaggctggtgtgctgactacaacgaaccaacttccttcctgaacaccatgctttcgaacagctcgatgaataccgcgcattataagagcccggcctttgacagcattatggcggaaacgctgaaagtgactgacgaggcgcagcgcacagctctgtacactaaagcagaacaacagctggataaggattcggccattgttcctgtttattactacgtgaatgcgcgtctggtgaaaccgtgggttggtggctataccggcaaagatccgctggataatacctatacccggaatatgtacattgtgaagcactaatggcaatacgtggggcaggagtgtcctgctccacggtgtctgatttttatcgcattacagaaggcacaggccagaaggtagggcaatgttaaaatttattctacgtcgctgtctggaagcgattccgacgctatttattcttattactatttcgttctttatgatgcgcctcgcgccgggaagcccttttaccggcgaacgtactttaccgccagaagtgatggccaatatcgaagcgaaatatcatcttaatgatccgatcatgacacagtatttcagctacctgaaacaactggcgcacggtgatttcggtccatcgtttaaatataaagattattcggtcaatgacttggttgcatccagttttcccgtttctgccaaactgggagccgcagcatttttccttgcggtaatactgggtgttagtgctggcgttattgccgcattaaaacaaaacaccaaatgggactataccgtgatggggctggcaatgaccggggttgttatccccagttttgtggttgcaccattattagtcatgatatttgcgatcattttgcattggctgccgggcggtggctggaatggtggggcgcttaaattcatgatattgccgatggtggcgttgtcactcgcttatatcgccagtattgcgcgtattacccgtggctctatgattgaagtattacactccaattttattcgtactgcccgggcgaaagggttacctatgcggcggatcattttacgtcacgcattaaaacctgctctgttacccgtgctctcttatatgggccccgcatttgtcggcattattaccggttctatggttatcgaaaccatttatggtttgccggggattggacaactgttcgttaatggcgcattgaaccgtgactattccttagtgttaagcctgaccatcctggttggtgctttaaccattttgtttaatgccattgtcgatgtgctatatgcggttatcgacccgaaaatccgttactgatactggagctcgcgatgatgttaagtaagaaaaacagcgagacgctggaaaatttcagtgaaaagctggaggtcgaagggcgcagcttgtggcaggacgcacgtcgacgttttatgcataaccgtgcggcggttgccagtctgatagtgctggtgctgatcgcgttatttgtaatcctggcaccgatgctttcccagtttgcctatgacgatactgactgggcgatgatgtccagcgccccggatatggagtccggtcactactttggtactgactcatccggtcgcgacctgcttgtgcgcgttgcgattggcgggcgtatctcactcatggtcggtgttgctgcggcactggtggctgtggtcgtcgggacactttatggttcgctttccggttatctgggcggtaaagtggattcggtaatgatgcgtctgctggaaatcctcaactccttcccattcatgttcttcgtcattttgctggtgacctttttcggtcaaaacatcctgctgattttcgtggcgataggcatggtttcctggctggatatggctcgtattgtgcgtgggcaaaccctgagtctgaagcgcaaagagtttattgaggcggcacaagttggcggtgtatcgacatcgggcattgttattcgccacattgtgccgaatgtactcggtgtggtggtggtctacgcatcacttctggtgcccagcatgatcctctttgaatctttccttagcttcctggggttgggtacgcaagagccgttaagcagctggggtgcattgctgagtgatggcgcgaactcgatggaagtctctccatggttattgttgttcccagcgggattcctcgtggtgacgctgttttgtttcaactttatcggcgatggcttgcgtgatgccctcgacccgaaagatcgttaaggagtgcagccatgagcgtaattgaaactgcaactgtgccgctcgcacaacaacaggctgacgcactgctgaacgtgaaagatttgcgtgtcacctttagtaccccggacggcgacgtcacggcggtcaatgatttgaatttttccctacgtgccggagaaacgctgggtattgtaggtgagtctggttcgggtaaatcgcaaactgcatttgcgttgatgggcctgttggctgccaacggacgtattggcggatcggcaaccttcaatgggcgtgaaatcctcaatttgccagagcatgaactcaataaactgcgcgctgaacaaatctcaatgatttttcaggacccaatgacttcgttgaatccctatatgcgcgtcggtgagcagttgatggaagtgctgatgctgcataagaacatgagcaaagctgaggcgtttgaagagtcggtgcggatgctcgatgcggtaaaaatgccggaagcgcgtaaacgcatgaaaatgtacccgcacgaattttctggcggcatgcgtcagcgagtcatgattgcgatggccttgttatgtcgacctaagctgctgattgcggatgaaccaacaactgcgctggacgtcaccgtacaggcgcagatcatgacgctattaaatgaactgaagcgggaatttaataccgccatcattatgatcacccacgatcttgtcgtggtggcggggatctgcgacaaagtgctggtaatgtacgccgggcgcacgatggaatatggcaacgcgcgcgatgtcttttatcaacccgttcatccttattctatcggtttgctcaacgcggtgccgcgtctcgatgcggaaggtgaaacaatgttgaccatcccgggtaatccgccaaacctgctgcgattaccgaaaggttgcccgttccagccacgttgtccgcatgcgatggaaatttgtagtagcgcaccgccgctggaagagtttacgcctggccgtctgcgtgcttgctttaaaccggtggaggaactgttatgaatgctgtaactgaaggaagaaaagtcctccttgaaatcgccgatcttaaagtgcactttgaaatcaaagatggcaaacagtggttctggcaaccgccgaaaacgctcaaagccgtcgatggtgtcactcttcgcctgtatgaaggggaaacattaggtgtggtaggggaatcgggatgcggtaagtccacctttgctcgcgccatcatcggtttggtcaaggcgaccgacggtcatgttgcctggttaggtaaagagttgctgggcatgaaacccgatgaatggcgtgccgttcgcagtgatattcagatgattttccaggatccgttggcatcgctaaacccgcgtatgaccatcggcgagatcatcgctgaaccactgcgtacttatcatccgaaaatgtcacgccaggaagttcgcgagcgcgtgaaggcgatgatgctgaaagtcgggttattgcctaacctgattaaccgctatccgcatgagttctctggtgggcagtgccagcgtatcgggattgcgcgtgctcttattcttgaaccgaagctgattatctgtgatgagccggtgtcggcgctggacgtgtcaattcaggcacaggtggtcaacctgctccagcaattgcaacgtgagatgggattgtcattaatttttatcgctcatgacctggccgtggtaaaacacatttccgatcgtgtgttggtgatgtatctcggccatgcggtagaactggggacctatgatgaggtctaccacaatccactacatccttacaccagggcattgatgtcggcagtccccatacctgatccggatctggagaagaacaaaaccatccagttactggaaggggaattaccgtcgccgatcaacccgccttccggttgtgttttccgtacccgttgcccgattgccggtccagagtgcgccaaaacacgtcctgttctggaggggagtttcagacactccgtttcttgcctgaaagtcgatccgctttaaaaacaataagggctgacagttgtcagccctttttcacgctaaaagcgattatttattcccgccagatgatatggcaaagtttgtgatctttttcgcggcataacagaatgcgggcaaaaacatcgttgatttcaccatcttcactgtccgccagaccaatcaccacttcggcaaaaaagtccgggttcaaatcgaaatcaacatgttcctgccagtcttccgccggatcgaataactccgcgccgccgcgctcttcaaactgaagattgaacagcagaacatcagctggatcgagattgtcggcagccagttcgagaaaaatatcgtaggcctgttcaagcgtttcatcttcagtcaggcgattgtttagatccatatccatagttactacctgtttaacctctgttggcgacgttttacagcaacggactgaagaagtaaaacagtcgctcggcgacacgttgccataatggacgttttagccataaacgggcatcgagcagacgtgaacgcgaaatataatcgtcctgaacggcggcgaggtcagcaccaaaacctttatcgtcgattgccagggtaatctcgaaatttagccacagactacgcatatcaaggttaactgtgccaaccagacttagttcgccatcgaccagcacgctcttggtatgcagtaacccgccttcaaactgataaattttaaccccagcagccagcagttccgtaaagaatgcgcgactggcccagccgaccagcatcgagtcattttttcgcggaaggataatactgacatccaccccgcgctgcgccgccgtgcaaatcgcatgaagtaaatcatcgcttggcacaaagtagggcgtggtcatgatcaaatattcacgcgccgaataagccgcagtcaataatgcctggtgaatgagatcttccggaaagccggggccagaagcaattgtgtgaatggtgtgaccgctggcctgttcaaacggcataatattgacatctggtggtggcggcagaatacgttttccggtttcaatctcccagtcgcaggaataaataatccccatcgcggtggcgatagggccttccatacgcgccatcagatcaatccattgccctacgcccgcatcttgtttgaagtagcgaggatcgaccatattcatgctgccggtgtacgcgatgtaattatcgatcatgatcatcttgcgatgttggcgcaggtccatacggcgtaaaaacacacgcatcagattgacctttaaggcttcgaccacttcaataccggcattacgcattagctcgggccacgggctgcggaaaaaagccacactcccggcggagtcgagcatcaatcggcaatgaatgccgcgtcgcgcagccgccattaatgattcagccacctggtccgccatgccgccgggctgccagatataaaacaccatctcaatattatggcgcgcgagctggatgtcgcggattaacgcctgcatcacatcatctgactcggtcatcagttgtagctgattccctttgaccccagcgatcccctgacgacgctcgcaaagcttgaataatggcgcagcgacactgctattttcttcggcgaagatatgcttacaggctttaaggtcgttaagccattttgcggtggaaggccacatcgctctggcgcgctcagcgcggcgtttgcctaaatggagctcgccaacggcaagataggcaataattccgactaacggcagaatgtaaataatcaacagccaggccatcgcggagggaactgcgcgtcgtttcattagaatgcgtaaagttacgcctgcaatgagcaaccagtatcccagaatggccaaccaactcaccaacgtataaacggttgtcatagattagaaatccttttgaaagcgcattgttatgagtttacgcatatggattcatctggcaaataaaaacgcgggaaaagcactggtcagcgtcgggggtgggggtataatgaccattctgttattgcatagagtagttaacatgaagcggagtagaacggaagtggggcgctggcgcatgcagcgtcaggctagccgacgtaaatcgcgttggcttgaggggcaatcgcgccgaaatatgcgtatccacagcatcaggaagtgcattctaaacaaacagcgtaactcgttattgtttgcgatctacaatatctaaatgtactgggcaccattgcggtgcccaataagtttactcttccgtctttaaactctatttttgcgccgattctttactgtcagctttcgtttctagttcatcgttatcgctgaaaataccatgacctgagttcaacaacattgaaacgagcatatcattattaatctcttcaccatttaaaactcgcgccagaatttcgctgccaaacagttgcggtgagagaatgatatccggatgtaccatcttaatcttattcaggtttttgctatcactgacggcgagaactgttttgacatcactgctcatatcttttgccgagagtacaacaaacgcgttatctgcatcgttatcactcagcgccagaatggcccggcaacgatcgattcccgctttctttaatacagaactgtcattactgtcaccggggataacatcagcattatcgcctaagcgttgctcaagttgcttgatatcatcttcaggcaagttgctgataaccgttacgttttgtccgcgttgattcagttgcaggatcgtattgatggcgagaatcgaatgtccgcaaacaataaaatgatctttacgatgcattgtatgattgtttccttttacaagtttgttgaatcccccgcggataagcggaccaaaaattgaggtcatagatgtggcaaaaacggtaatgccggaaataatgaccgaaatagtgaacaatcgtgctgattcagaaacagggacaatatcgccatagccgacggttgacatggtttctatcgaaaaatagaacgcggtcatcaaactttctattcgcggattaaaaccttcgcttaaataaagcgcaccgtaggttgagtaaaacagtaatgtcgtgaaactaataaatgcaaaaattgtcccggctgcggcgctactgtgggagaagtctttgcgcagtatcagcaaaaacaccagcgtaaaaatgcaaaatccaatactaaatttcagccagggataaaaatgcagggtgtaaattagcgctatcaacaacaaaatgatactgattgcccatgcgagctttgcccggaacagtaagccaatggagttcaggacaagaaagacgccgagcataaagagtggggcgtttgccagcaaggagagatccaactctgaaaatgctttgatatggaaaatatcaagcaaattgaccgacataccatagattgttttaaaaataagcaatccatttaaaaagacggccagcgcgagaatgtcgtgccgaagggtcacccataaatttgttgctgtttgtttgaatgtagcccagtgactcactgatacctctgtaaccacaattttgtttaattatcttagcgtgcacattttctgaacatacatgcagcgcgtgaatgtgttaaacaatagtagatgactttatccgcagtaatcaaaggatttgagcgagcaactgtacctcaggaaaggtcatttttcctgaatatgctcacatcatataaagaaatacagataaagttattatctgcttgtggtggtgaatgcactgaccggctataaggaaaggccaaacaagaacacggttgcaaaaaccgtgcccttaaatattgaatctctattcagaacactttcttaaatggtttcactgaaacgtgttcatagactcctgccgctacgtacgggtcagcatcggcccaggcctgagctgcttccagcgattcaaattcagcaataacggttgagccagtaaatcccgcagcccctggatcgttactgtctaccgctggcattggaccagctgtcaacaaacgaccttcatcatgcagtaactgtaaacgtgctaaatgtgccggacgaacggaaaggcgtttttcgaggctatcagctttgtcttgagcgtaaataacatacaacacgggcacaactccttgttcgggaaagttgtaaagtacgttatttgaaagggcgaagatctgcaacggaaagatgatgtctttgttaaggccatgcataaagtaagggtaattacgccaaaaatgacattttcactgatcctgatcgtcttgccttattgaatatgattgctatttgcatttaaaatcgagacctggtttttctactgaaatgattatgacttcaatgacccttgatttacctcgccgcttcccctggccgacgttactttcggtctgcattcatggtgctgttgtggcgggtctgctctatacctcggtacatcaggttattgaactacctgcgcctgcgcagccgatttctgtcacgatggttacgcctgctgatctcgaaccgccacaagccgttcagccgccaccggagccggtggtagagccagaaccggaacctgagccgatccccgaaccgccaaaagaagcaccggtggtcattgaaaagccgaagccgaaacctaagccaaaaccgaagccggtgaaaaaggtacaggagcagccaaaacgcgatgtcaaacccgtagagtcgcgtccggcatcaccgtttgaaaatacggcaccggcacgcctgacatcaagtacagcaacggctgcaaccagcaagccggttaccagtgtggcttcaggaccacgcgcattaagccgtaatcagccgcagtatccggcacgagcacaggcattgcgcattgaagggcaggttaaagttaaatttgacgttacgccggatggtcgcgtggataacgtacaaatcctctcagccaagcctgcgaacatgtttgagcgtgaggtgaaaaatgcgatgcgcagatggcgttatgagccgggtaagccaggcagtgggattgtggtgaatatcctgtttaaaattaacggcaccaccgaaattcagtaagcagaaagtcaaaagcctccgaccggaggcttttgactattactcaacaggtaaggcgcgaggttttccttcaggatcaaccgcgacatacttaaataatgcttctgtcgctttatagcgttgcccaattggttcagacgctacttttttcacccacacttcaatattaatgctgaccgatgtcgtccctttctggacacagcgtgcatagcagcacaccacatcgccgaccgcaaccggccgtaagaaagtcattccttcaacccgcacagtcactacgcgaccgtgggcaatttcttttgccagaatagcgccgccaatatccatttgtgacattaaccaaccaccaaagatgtcaccattggcattggtatcggcgggcatggctaaagtacgtaaaacaagatcgccctgagggacgttatgtgttgtagacatggtaaaaccgacttaaaaggaaaatcacaggcgcgatgctactatgattttcctgaggagaacagaggagatacagcgccagccccgaaggactggcagtctggttaggatttatcttcctgcggcatgtggcggtagatatagataccgcttaacaatgtgaagattaaggtaagggcggtcaggccaaagactttaaagttgacccaaatattttgcggcagccagaatgcgatgtagatgtttgccagaccgcaaaggataaagaaaacagcccaggccagattcagcttcgaccataccggttgcggcagcgtgagttctttacccagcatccgctgaattagcggctttttcatcacccattggctgactaacagggctcccgcaaatagagcataaatgacagtaaccttccatttaataaactcatcattgtggaagaacagcgtcaagccaccgaagacgaccaccagaacaaaagtgatcagggccatcttctcaaccttacgaaagcgaacccagctatagataagcacaatcgccgtggcgacgatcagcgccgcagtagccgcatagatgtcataaatcttgtaaaacgcgaaaaagacaaccagcggtaaaaaatcaagaaactgcttcattttacgattccgtaatcaaatgcttaaggttattggcgaatcaacatatacaggcggaacagatagatgagcaatatggctgaaatcaggttgctcaaggtgttcgccagtacggcaccaatttccggggttaatgcggcaaaagaagaggcaaaaagcagcaacagtgtttttgccagcaaccagctcagtactgcgggtgccaccagacgcatattcgcccaagtcagccgcatactgctacgcatcgaggcaaaaacgcccattttgtcctgtaccaacatcaccggtgccagggccagtaaaatggccatgataattcccggaacgaccaccagcatgatgccaatctgtactaaaagggtagtcagaaaaatcagaataaataactttggcaatatcggcgcactggcaccaatagctcgcagcgcactgactctctgacccgcagacaccagctggataattaatattacgcctccggcgagaatggcgttaccgattaatcctgaaaaagtggacgccgctgaagcctgcagcaaaatttgttgctgttccggtgacatattctgaaccaggtcgaacaacccactactgccgctaacgggcacgccgtcattgagctgcgcaagctgtgcatcactgggtgagaaaacatgccctaacaccactgtgataaacgcacatagcaacgataccaacagaatggtcataaattgattacggaagaaatttccggtgtcacggtatacggactgcgccgtgatagacatgcactctccttgagttttatgcaggtgttaattagcgggcaattgtaccctggttaagcctcgggtggcagcatcaggtcttgtatggaaaagcatatctttgtaaagcggaggtaattgctggccttcaggcatgggcaaatcgcggcaagtggcgaccgagttaatatttgcgtagcgaaaatatttaaaaattgatttaaatcacattaaccaggattctcaatgcaacttctaaattaatccagatcaataaagggtgaattatcatatgtaatgtgatctatgtaggatcatttgttactccaatgtaggtatattcgtcacgtttttataaccataacgacggagcggatatgaaaaagttaacagtggcggctttggcagtaacaactcttctctctggcagtgcctttgcgcatgaagcaggcgaattttttatgcgtgcaggttctgcaaccgtacgtccaacagaaggtgctggtggtacgttaggaagtctgggtggattcagcgtgaccaataacacgcaactgggccttacgtttacttatatggcgaccgacaacattggtgtggaattactggcagcgacgccgttccgccataaaatcggcacccgggcgaccggcgatattgcaaccgttcatcatctgccaccaacactgatggcgcagtggtattttggtgatgccagcagcaaattccgtccttacgttggggcaggtattaactacaccaccttctttgataatggatttaacgatcatggcaaagaggcagggctttccgatctcagtctgaaagattcctggggagctgccgggcaggtgggggttgattatctgattaaccgtgactggttggttaacatgtcagtgtggtacatggatatcgataccaccgccaattataagctgggcggtgcacagcaacacgatagcgtacgcctcgatccgtgggtgtttatgttctcagcaggatatcgtttttaattccgcacaaaaacgaccccgtaatatacggggtcaataaggacatggtataaagggtattatttcttcgcttctacgccatcagtttcagagcgaattaaaaatttctcagttgtttgcggaatattctgaatcagccagtcggccatttgcttttcctcatttaaaatcgcttcgatggttggaattgaagctgtatcaccggcattttttgctgctgctaatagtgaggtgtaacaggcgatttcaaattgctcgaagacatatccgctaatagagcctttgactatttcatcagaagggaatataccaccgattgactgcccaagcgcagccattttactcatggaatctttaatgactgaacgtgaaatgtcattacgatcaagaatagtttccagttgaacaatctggtttttggtttcactaagatgttgttcaatacgagcgcgtagttcaggataattatctatacggctggccatggattcaagcatagattcggcttgcttttccattgcgtgggcgtcacgtaaccagtcatgataatgttcaatacgattcatgaaaatgtcctctttataaaatgactaaaagttaaaattcatatttcaggctttattttcggctttcttatttacgttattaatggccagatcagtcagtttgatgtcggtggccttttcttcttccagggtttctttcagaagcttcgctgctttacggtaacctaattgttcagccagcgtcgctaatgtcccgtaactggcaatctcataatgctcgactttctgtgctgcggcaatcagtgcggcatcacgcacttcgtttttctcggtactttcgatgacctcattagcttcttcaataagaccttccattgccacacatttcatgcgcttaattttcaggttcgattcggactccacaacttgatcaatacgttcaatctgtccatgagtttcctcgaggtgcgcatgaaaagcctgacttaatttttcatttgatgttgctcttgcgagttttgccagtgcccgggttaattgtttttctgcgctgtaggtatctgaaagcaggtgaataaatacatcttcaatggtcttcatattcatatttttctccagtgaaatcactgcgagccatacggcccgcagatgcaattatctttatcagctgatattaataattaacggtgaatcaggatttgcctgatttattaccaccgctttgttgaccgccttttttacccgcttcagatgcgcgttgcggatcatttttaaaattaccgccgctatgctgaccgcctttacggcctgcgtcggatgccttctcacggtcttcggcgaaatttcctgaaccaccacgatgttcggccatgttatttctcccgttgcgttgcattgtttcattaatatgagtgttgtgtgtcgacactcattaaaattagtcgctaatgagaattagtcaaattaagcgcaacgagaagatagagggaaaatatattttgaggaacattctggatatattaacaattacctgaggaataagtgacttagagaaaattattgattttactggtgttatgttgcgggattaatttgtttgattatattactgttgggcggaaaaatgacgtaagttgacgttcgaccggggtaagcgaaacggtaaaaagataaatattaaatgaatttaggatttttccggcttcattaaagaaagttaaaatgccgccagcggaactggcggctgtgggattaactgcgcgtcgccgctttcatcggttgtacaaaaactttcagtgccgccagcattttctctggctcattaatatgttgctcgatgattttaacaatggccgaaccagaaatcgcgcccgcagctcctgcatcaatcgctgcttttacctgatccggggcggaaataccaaatccctgcaatggaggtgcagcgttgtactctttcagcttcgcaaccagatgattgaggggtaacgcggcgcggttttctgcgccggtcacgcctgctcgtgacagcaaataggtgtaaccacgaccgtaagaggctatctggcgcagcaggtcgtcatcggcatttggcgggcagatgaagataggtgcgacattatgacgcaacgcggcctggcggaagggcgcggactcttcaactggcacatcggcaaccagcaccgaatcgacgccgactttttcgcactgggcataaaactcatcaatgcctttgttaaacaccagattggcatacatcaacaggccaatgggaatggtcgggtgtttctggcgaatcagtgccagcatttcaaaacattgtgccggagtcacacctgccgcaaaggcgcgcagagtggcgttttgaatcgtcgggccatccgccagtgggtcggagaaggggatacctaactccagcgcgtcagcaccggcttcaattagcgtatcgataattttcaatgactgctcaatgcccggatcaccgagcgtgacgaaaggaacgaatgcgccttctttgcgctccttcaactgggcaaacagagattcgtagcgttccatcagatttcccctcgtgctttcaaaatatcgtgaacggtgaagatgtctttatcgccgcgaccggaaaggttaaccaccagtagctgctctttatccgggttttcgcgcatcattttcaacgcatgggccagggcgtgggaggattccagcgccgggatgatcccttcgtgcaggcacagcgttttgaaggcttcaagggcttcatcatcggtaatagacacgtaatcagcgcgtccagtgctgttaagatacgcgtgttgtgggccgacagacgggaaatccagtccggcggagatggagtaagattcttcaatctgcccgtcttcggtttgcatcatcggcgctttcataccgaaatagatacccacgcgaccatgttttagcggtgcgccgtgctcgccagtttcgataccgtgaccacctggctccacaccaatcaggccgacgttggtttcattgatgaaatcagcaaacatgccgatggcattcgaaccgccgccaacacaggcgataacggcatccggcaggcgaccttctctttccagaatctgcgctttggtttcttcgccaatcatccgctgaaactcacgcacaatggtcggataaggatgcgggccagctgcggtgcccagcatatagtgcgcggtttcgtaactaccggaccagtcgcgcagcgcctcgttacaggcatctttcagcgtcgcggaaccgctatgcaccgggatcacttccgcacccattaagcgcatacgaaaaacgttaggcgactggcgttcaacgtctttggcacccatataaatacggcatttcaggccgagcagggcgctggcaagggccgacgccacgccatgctgaccggcaccggtttcggcgatgatttcggttttacccatccgcttcgccagcaacgcctgccccagcacctggttagttttatgcgcgccgccgtgcagcaaatcttcacgcttgagatacagcgtggtgttcgtcccggctgtaatgttctggcatttggtcagcgcggttggacgcccggcatagtttttcagcaggtcgttgaactgagcctgaaattcaggatctttttgcgcactgacaaaagcttcttccagctggcgcagagcaggcatcaggatttgtggcacgtacatgccgccaaactcaccaaaataggggttaagtaatgttgtcattgttcctttccttaatatgcgcgcagcgtctggaaaaccgaggccaaaagacgtgcgtctttgatgcccggttgcgactctacagcagaattaaaatcaagtccggcgcagccggtttgtgccgcttccacgcagttatctgcgcctaagccccccgccagcagaacgttgccaagcgattgaccatttaatagtgaccagtcaaaacgttgcccgcttccaccctggccgttgtctaaaacatatttatcaacgtgctgaaactcgcgggcgggcagggtttcaccgacgcttaatgctttccagatggcaacatgtgctggcagagcttcacgcagcgtatcgatatacagctgttcttcattaccatgcagttgcactgccgccagcgataacaccttagctttgtccaccacatcggcaatatcgtgattgcggaacacgccaacatactgcaacggtgccgcagccatcacttcctgcgcctgttcaacgttgacgcaacgcggtgatgtcgcaacaaaaatcaacccaccgtaaatcgcgcccgcgtcataagctgctttagcatcttgcccacgcgtcaggccacatactttattctcacccagcaacacccggcgcacggcggcgtgcaaatcgtcatgggccatcaacgccgaaccaatcagaaaaccgttagcgaagtggcttaactcgcgcacctgagcgtaagtattgatgccggattcgctgattaccgtcacgttgtgccccagtttcggcgcaagctcgcgggtacggttgagatcaatcgacaaatcacgcagatcgcggttgttgatgccaacgacctttgctcccaatgcaatggcgcgctcctgttcctcttcattactgacttcggtcagcacccccatctccagactgtgagcgacggcggcaagctggcgatattggtcgtcatccagtactgaaagcattaataagcaggcatcggcctggtaatagcgcgccagatagatctggtaagggtcgataatgaagtctttacataaaatcggctgcggggcgatttggctgacgatggggaggaaattaaagctcccctgaaaatatttctcatcagtcagcaccgaaattgccgaagcgtaatgtttataaatggcggcaatgcgtgctggatcgaaatcatcacggatcacgccttttgacggcgacgctttcttgcactccagaataaacgccgtgcgcgcaccctgtagcgcatcataaaaatgtcgcgtgctcggctgaacctcattctgaaaactggccagcggttgctgctgtttgcgggcttctacccaaatcgccttgtctgcgacgattttcgctaaaacggtttgcatcatttaccctcgtgccgccagtgcggtgactctgtcgtaagcggaaccactgcgcagtacctcaagaacggtttgcgcattggcttgcagatcttcatggccatgcaggcgcattaacatggcgacgttcgcagcgacggctgcttcatgggcggcgtcgcctttaccttgtaacaaacgtgttaaaatgtcacggttttcttccggtgttccgcctgccagttgctcctggtggtagggtgtcaggccaaagtcttctgcggtgagctgatagcttttaatttcgccgtcatgcagttcggcaacgattgtcggcgcgtgtaatgaaacttcatccatcccgccgctgtgcaccaccgccgcgcgttgataccccagcacgcgcaaggtttcggcaatcggcagcaccagttccggactataaacaccaattaacgccagcggcggatgcgccgggttaatcaatggccccagcacattgaacagggtgcgggttttcagttgctggcgaaccggcatcgcgtggcggaatccggtgtgatacttcggcgcaaagaggaaacatacacctaactcatccagcgcctggcgcgatttatcggcgttcatatcaagattaataccgaacgccgccagcagatcggacgaaccagatttactggagacgctacggttgccgtgtttcgccactttcagcccacaggccgcggcgacaaacgcactggcggtagaaatattgatactgttgctgccgtcaccgccagtaccgacgatatcagcaaacagataatccgggcgcgggaacggcgctgcgttttccagtagcgcggttgctgccccggcgatctcgttcgggtgctcaccgcgaattttcatgctcaccagcgccgccgccagttgttccggcttcagctcgccacgcaccaccgctgaaaacagctggtggctttcttgttggctaagcgtctgcgcctgatacagtttttccagaatcggttgcagcgtgttggctggctctagtttctgctgcgcccaggccagcgtttgttccagcaggcgagcgccctgggtggtgagaatggattccggatggaactggaatccacaaacgcgatccgcatcgtgacgtactgccatcaccatgccattaaaatgggcgttgatggttaaaccggccggaatgttactgccaaccagcgagtgataacgcgccaccggcagcgggtttgttaatccggcaaacatcgcctgaccgtcatgttcaatgctggaggctttaccgtggagaatttcgcccgcctgaccgacatagcccccgtaagcttcgacaatcgcctgatgtccgaggcaaatgccaataatgggcagcttgccacgcaagcgggtgaggagttccggcatacaaccggcttcgctcggcacaccggggccaggagaaagcatcagcaccggattgctcatggtcgccaggcgttcaattaaggtttgcgccggaatatggttgcggtaaatcaccacgttatgcccattgctgcgcaactgatctgccaggttgtacgtaaaagagtcgatattatcgagcagcagaatgtcagccatcagaaagtctcctgtgcatgatgcgcggtggcaatagcgcgcagtacagcgcgggctttgttacgggtttcgtcggcttccgactgcggaacagaatcaaggactacaccagcacccgcttgcacggtggcgataccgttttccaccagcgccgagcggatcacaatgcaggtgtcgagatcgccatgcgcggtgaaataacctaccgcgccgccgtagctgccgcggcgacgaccttccgcctcggcaattaactgcatagcgcgtactttcggcgcaccgcttaacgtccccatattcatacaggcgcgataagcgtgcagggcgtcaagatcgtgacgcagttcgccgactacgcgagagacgaggtgcatcacataggaataacggtcaactttggtgagatcggcgacgtagcggctgccgggggtgcaaatgcgtgccagatcattacgggcgagatcaaccagcatcagatgttcagacagctctttatgatcggtacgcatttccagttcaatacggctgtcgagatctctgtccagtgaaccatcggcgcgacgaccgcgtgggcgtgttccggcaatcgggtagatctcaatctggcggctggtggcatcatacttgagcgagctttccggcgacgcgccaaatagggtgaaatcattatcctgcataaaaaacatgtacgggctgggattactctttttcagcacgtaataggccgccagcggtgacgggcagggcagagagaaacggcgagatggcaccacctggaaaatttctccagcgcgaatcgctttttgcaacaaacgcactacgccaccgaactcttcatcgctctgattacattcacaacgcatatgcggcacggaaaccactggcagcggcggcgcggcttcggtcagttgctgacgtagttcgttcaggcgagcagtgagacgttgtttttcttcttcattcggagcaaacaggctggcctgaatacgggtgctttttttctgatggtcaatcaccatcagcgtttcagcgagataaaaacagaaatcagggcagttattttccgctgacagttgcggtaaatcttcaaatcccgccacaaggtcataagagaacaggccgccgaagaacatggcttctcgttcttccttcggtacattcaacagattctgcaataaacggaaagcgtcaaaaaccgaaagggagcataagcgggcgtcttcatccagcagtggactgacaggggggaagcgcagcacacggcagtttggtgattgttcactttccacacccgcaggcagggcgttatccagtagtgccaggagggcttcgccgttgccggaaagtgcctggattgtgacagtgtcacctaaagctgtaatgcgcagcgcactgtctaccagcagcaggctttttaaatcatctttgctgtcgatatctgcggattccagcagcagcgttgccggacgatccccacacaactggtgaaaaagcgcggtgggattgtcgcgataagcgccttcgcaggttagcagttcgagagtcggtttttgtgtttgcattgttattctctaattttgttcaaaaaaaagcccgctcattaggcgggctgggtatctgattgctttacgcatggtgaatacactgcccgtttcaggaagtgcgccaccaacctttcagtacgaaaattgctttcattgtcgataccctttttacgtgaacttgcgtactagttaactagttcgatgattaattgtcaacagctcatttcagaatatttgccagaaccgttatgatgtcggcgcaaaaaacattatccagaacgggagtgcgccttgagcgacacgaattatgcagtgatttacgacctgcacagccataccacagcttccgatggctgcctgacgccagaagcattggtgcaccgtgcagtcgagatgcgcgtcggcaccctggcgatcaccgaccatgacaccacagctgcaatcgcgccagcaagagaggaaatttcacgttcgggactggcgttgaatcttattcccggcgtggaaatttccacggtctgggaaaatcatgaaattcatattgtcgggctgaatattgatattactcatccgctaatgtgtgagttcctcgcgcagcagacagaacggcgcaatcagcgggcgcagctgattgccgaaagacttgaaaaagcgcaaatacctggggcgctggaaggcgcacaacgactggcgcagggcggcgcagtgacgcgcggtcattttgcgcgtttccttgttgagtgcggcaaagccagttcaatggcggatgtctttaaaaagtatctggcgcgcgggaaaaccggatacgttccgccacagtggtgtacaatagaacaagctattgatgtcattcatcattctggcggtaaggcggtgctagctcatcctgggcggtacaatcttagtgctaaatggctgaaaagattggttgcgcattttgccgaacaccacggtgacgcgatggaagtcgcgcagtgccagcaatcgcccaatgaacgtacccagctggcggcccttgcgcgtcagcatcatttatgggcatcacaaggatctgattttcatcagccatgcccgtggatcgaactgggtcgtaaactctggctgcccgcaggcgttgaaggcgtctggcagctatgggaacagccgcagaacaccacagagagggaattatgagccagtttttttatattcatcctgataacccacagcaacgtctgatcaaccaggcggtggagatcgtgcgtaaaggcggggtgattgtttatccaactgattccggctatgcgctcggctgtaaaattgaagataaaaacgcgatggagcgtatttgtcgtattcgccagctgccggacggtcacaactttaccctgatgtgtcgcgatctttctgaactctcgacctattcatttgttgataacgttgcgtttcgtttaatgaaaaacaacacgccgggcaactataccttcatcctgaaggggacgaaggaagtgccacgccgtctgttgcaggaaaaacgcaaaaccatcggtatgcgtgtgccttctaaccctatcgctcaggcgttacttgaagcattgggcgaaccgatgctttccacttcgctaatgctgccaggcagcgaatttaccgaatcggacccggaagaaattaaagatcgtctggaaaaacaggtagatttgattattcacggcggctatctcgggcagaaaccgacaacggttattgatcttaccgatgatacgccggtcgtggtgcgtgaaggcgtaggtgatgtgaagcctttcttataacaaattgcgttccacggatggaagactatggcagggaagtttcgctgcattttgctgttgatagcagggctgtttgtatcatctctaagttatgcagaaaacacggagatcccttcttatgaagaagggatctcgctctttgatgttgaagccactctgcaaccagatggggtgctcgacatcaaagaaaatattcattttcaggcgcgaaatcagcagattaagcacggcttttatcgtgatttaccacgactatggatgcagcctgatggggacgctgcactgctgaactatcatattgttggcgtcacccgtgatggtattcctgaaccctggcatcttgactggcatatcgggttaatgagtattgtcgtgggcgataaacaacgtttcttgcctcaaggcgactatcattatcaaattcattatcaggttaaaaatgctttcctgcgtgagggggattctgatctgctaatctggaacgtgaccggtaaccactggccgtttgaaatttataagacccgtttttctctccagttctctaatattgcgggtaatccatttagcgaaatcgatctttttaccggagaagagggcgacacatatcgtaatggccgcatccttgaggacggaagaattgaatcccgcgatccgttttatcgtgaagatttcacggtcctctaccgctggcctcacgctttacttagcaatgcctcggctccgcaaacgacgaatattttcagccatcttcttttaccctccacgtcatcgttgttaatttggtttccgtgtctgttcctggtttgtggatggttatatctctggaagcgcaggccgcaatttacgccggtagatgtgattgaaaccgatgtcattccgccagattacacgcccggcatgttacgtctcgatgcgaagctagtttacgacgataaaggtttttgtgccgatatcgtaaatctgattgtgaaaggaaaaattcatctggaagatcagtctgacaagaaccagcaaatcctgattcgtgttaatgaaggcgcgaccagaaataatgcggtattactgcccgcagagcagttattactggaagcgttatttcgtaaaggcgataaggtcgttcttacggggagacgcaacagagtcttacgcagggcatttttacggatgcagaaattttatctgccgcgtaaaaagtcttcgttttaccggtctgatacttttttgcaatggggtggactggcaatattggcggtcattctttacggtaacttgagtcctgtaggctgggcaggaatgagtctggtgggcgatatgtttattatgatctgctggattattccttttttattttgttcccttgagcttttgtttgcccgcgatgatgacaagccttgcgttaatcgtgtaatcatcactttgtttttaccactgatttgttcaggcgtggccttctattctctctacatcaatgtcggagatgtattcttttactggtatatgccagcgggttattttaccgctgtttgcctgaccggttatctcactggcatggggtatatttttctgccaaagtttacccaaactggacagcaacgttatgcccacggtgaagctatcgttaactatcttgcgcgtaaagaggcagcaacacacagtggacgtcggcggaaaggggaaacacggaaactggattacgcgttgctaggttgggctatatcggcaaatttggggagggaatgggcgttacgcattgccccttcgctttcttcggcgattcgcgctccagagattgcccgtaacggcgttttattctcattacagacgcacctaagttgcggggccaataccagtttgttggggcgaagttattccggtggtggtgctggcggcggcgcgggtggcggaggcggtggtggctggtaattaagctgatgttaatcgaaacaagctttaaccataaagatagtgtagtatgttgcgcctcaaagccaggccgataaacgtcgagtcgtttacttaaggcctgaagagttcaaacagactttactatcagtgagtcagatgtaagttctgactcactgttgcacaaaagcatatcagacgcctgggaaggcgacaccaaaaggaagctctatgagcgaaaagctacagaaagtgctggcgcgtgccggccacggttctcgccgtgaaatcgaatctattattgaagccggtcgtgtgagtgttgatggcaaaattgctaaactcggcgatcgtgttgaagttacccctggattgaaaatccgtatcgatggtcacctgatttcggtacgtgagtccgctgaacaaatttgtcgcgttctggcctattacaaaccggaaggtgagttgtgtacccgtaacgatccggaaggacgtccaacggtgtttgaccgtctgccaaaactgcgtggcgcacgctggattgccgtgggtcgcttggacgttaatacctgtggtctgctgctgttcaccaccgatggtgaactggcaaaccgtttaatgcacccaagccgtgaagttgaacgtgaatatgccgtgcgtgtatttggtcaggttgacgacgcgaaactgcgtgatttgagtcgtggcgtgcagttggaagatggtccggcagcttttaaaaccatcaagttcagcggcggcgaagggatcaaccagtggtacaacgtgactctgaccgaaggccgtaaccgtgaagttcgtcgtctgtgggaagcggttggtgtgcaggtgagccgcctgatccgtgttcgttacggtgatatcccactgccaaaaggtctgccacgcggtggctggacggagctggacctcgcccagactaactatctgcgcgaactggtggagctaccgccagaaaccagctctaaagtcgctgtagaaaaagaccgtcgtcgcatgaaggcgaatcagattcgtcgtgcggtgaaacgtcacagtcaggtgagcggcggtcgtcgttctggcggacgtaataataacggttaatcaaagtatgccggacgtcatatccggcatttttacagattaataatcgatccctatctgcgcttttacaccggcatcaaacgcatgtttgacggggcgtaattcacttaccgtatctgccagttcaagaatatcccgatgacaaccacgacccgtgataatcaccgtctgttgatgtggacgttcatttaacgcctgcaccacttcttccagtggcaaatagtcatacgccaccatatacgtcagttcatcaagcaaaaccatatccagtgaggaatcagcaagcatccgctttgcatgttgccagacttcgcggcaggcggcggtatcagactcgcggttttgtgtatcccaggtaaagcccgttgccatcacctgaaactcaacgccatgtggctccagcagattgcgttcgccattaggccaggtgcctttaataaactgcacgacgcctactttttttccgtgaccaactgcgcgtgttgccgtaccaaatgccgcggtggttttgccttttccattgccggtaaagacgatgataataccgcgttcatcctgggcctgggccacacgagcatctactttttctttcactcgctgctgacgctgttggtagcgttcatcactcattgggaaattcctggtttacggcccggttgggcgtcaaaggtcatgccggttttacggcggctgtcatcgcccatcagccagaggtagagcggcatgatatcagcgggtgttttaagtttctgtggatcttcggtcgggaaggcgctggcacgcattgcggtgcgcgtaccgcctgggttaatgcagttgacacgcaggcgctgctgatattcatcggccagtacctgcatcatcccttcggtggcaaatttcgacgctgcatatgcaccccagttggctcgtccctgacgtccaacgcttgatgaagtaaagaccagtgaaccggcgtccgatttgagtaataaaggaagcagtgcctgggtgagcataaaggtggcattaacgttgacctgcatgacgtcctgccagacctgcggattttgttcgctcattgggcaaacatcgccgagcaatccggcattatgcaaaacaccatccagacgcggataattaacggcaatgcgctgtgccagttgttggcaattttcggacgtgcaggtcagcaaatcgagaataaaccactgtggctgacgcccagtttcttcgtttatgtggctggctacctgacgtaatttttcttcattacggcccaacagaatcactgtcgcaccatagcgtgcatacgtcatcgcggcttcacgaccaataccatcgctggctcccgtcaccaggataatgcgatcattgagtaaatcttgttttggctggtaatgcatggctactcctcaacgacgttgtctgtcgcgctgccagtgtactttatgactttggggctttatgcctgaaacagaagggcatttcaatcagcctggggcgataacaccgcaaaatggatactttgtcatactttcgctgcaataacatctctgcgagacggcttaacatgcctgttgtaaactgtgagccaaagcgttgtttaaccaaggtggggactcgtggaattgttgtctgaatatggtttgtttttggcgaaaatcgttaccgttgtgctagcgattgcggcgattgccgccattattgtcaatgttgctcaacgtaataaacgccagcgtggcgagttacgggtcaacaatctcagcgaacagtataaggagatgaaagaagaactggccgcggcgctgatggactcacatcagcaaaaacagtggcacaaagcgcagaagaaaaagcataagcaagaagcgaaagcagcaaaagcgaaagccaaactgggcgaggtggcaactgacagtaaaccccgcgtctgggtgctggattttaaaggcagcatggacgcccatgaagtgaactcgctacgtgaagagataacggctgtactcgcagcattcaaaccgcaggatcaggttgtgctccgtctggaaagccctggtggcatggtgcatggttacgggctggcggcttcgcaactgcagcgtctgcgcgataaaaacattcctttaactgttacggtagacaaagtcgctgccagcggcggttacatgatggcctgtgtggcggacaaaattgtttccgcaccgtttgctattgtgggttccattggcgtggtggcgcaaatgcccaactttaaccgcttcctgaaaagcaaagatattgatatcgaactgcacactgccgggcagtataagcgcacgctgacgttgctgggtgaaaataccgaagaagggcgggagaaattccgcgaagagttgaacgaaacgcatcagttgtttaaagattttgtgaagcgtatgcgtccttctctggatattgaacaggtggcaacgggtgaacactggtacggacaacaggcggtagagaaaggcctggttgatgaaatcaacaccagtgatgaagttattcttagcctgatggaaggccgtgaagtggtcaatgtacgctatatgcagcgtaaacgactcattgaccgattcaccggcagcgcggcagagagcgccgatcgattgttgctacgctggtggcagcggggtcaaaagccattgatgtaaaagacaaacgcgaggctaagacctcgcgttttgctttaatcaaccagatgatatttttctgaaagcacatgggccaggtgtttgaacatattaaacaccgcggtgcttttggctgttggcaatccttgttcatctaaaaagtagtcgccggtaaataccagcacgccattacgctgcgtgacgccggtggcttcaatccctgcgagcgtatcctcatgctcacgaatgattttgttggcctctttcaacagcgtttcgcggtcgatgggttgtgtctctttgttcattatttactccttaaacaaggacattagtctacgccaggcatggcttgcagacaaatataccacgctggtggcaagagcgccttactggcaactttggattttgcatgctaataaagttgcgtatcggattttatcaggtacagtgtgacgctttcgtcaatctggcaatagatttgcttgacattcgaccaaaattccgtcgtgctatagcgcctgtaggccaagacctgttaactcagtcacctgaattttcgtgaacagagtcacgacaaggggttgatatccgcagagagcgagtccatatcggtaactcgttgccagtggaaggtttatcaacgtgcgacgcattcctggaagaatcaaattaggtaaggtgaatatgggtaaagctcttgtcatcgttgagtccccggcaaaagccaaaacgatcaacaagtatctgggtagtgactacgtggtgaaatccagcgtcggtcacatccgcgatttgccgaccagtggctcagctgccaaaaagagtgccgactctacctccaccaagacggctaaaaagcctaaaaaggatgaacgtggcgctctcgtcaaccgtatgggggttgacccgtggcacaattgggaggcgcactatgaagtgttgcctggtaaagagaaggtcgtctctgaactgaaacaactggctgaaaaagccgaccacatctatctcgcaaccgaccttgaccgcgaaggggaagccattgcatggcacctgcgggaagtgattgggggtgatgatgcgcgctatagccgagtggtgtttaacgaaattactaaaaacgcgatccgccaggcatttaacaaaccgggtgagctgaatattgatcgtgttaatgcccagcaggcgcgtcgctttatggaccgcgtggtggggtatatggtttcgccgctgctatggaaaaagatcgctcgtggcctgtctgccggtcgtgtgcagtcggtggcggttcgcctggtggtcgagcgtgagcgtgaaattaaagcgttcgtgccggaagagttctgggaagtcgatgccagcacgaccacgccatctggtgaagcgttggcgttacaggtgactcatcagaacgacaaaccgttccgtccggtcaacaaagaacaaactcaggctgcggtaagtctgctggaaaaagcgcgctacagcgtgctggaacgtgaagacaaaccgacaaccagtaaacctggcgctccttttattacctctacgctgcaacaagctgccagcacccgtcttggatttggcgtgaaaaaaaccatgatgatggcgcagcgtttgtatgaagcaggctatatcacttacatgcgtaccgactccactaacctgagtcaggacgcggtaaatatggttcgcggttatatcagcgataattttggtaagaaatatctgccggaaagtccgaatcagtacgccagcaaagaaaactcacaggaagcgcacgaagcgattcgtccttctgacgtcaatgtgatggcggaatcgctgaaggatatggaagcagatgcgcagaaactgtaccagttaatctggcgtcagttcgttgcctgccagatgaccccagcgaaatatgactccacgacgctgaccgttggtgcgggcgatttccgcctgaaagcacgcggtcgtattttgcgttttgatggctggacaaaagtgatgcctgcgttgcgtaaaggcgatgaagatcgcatcttaccagcagttaataaaggcgatgctctgacgctcgttgaacttacaccagcccagcactttaccaagccgccagcccgtttcagtgaagcatcgctggttaaagagctggaaaaacgcggtatcggtcgtccgtctacctatgcgtcgatcatttcgaccattcaggatcgtggctacgtgcgagtagaaaatcgtcgtttctatgcggaaaaaatgggcgaaatcgtcaccgatcgccttgaagaaaatttccgcgagttaatgaactacgactttaccgcgcagatggaaaacagcctcgaccaggtggcaaatcacgaagcagagtggaaagctgtactggatcacttcttctcggatttcacccagcagttagataaagctgaaaaagatccggaagagggtggtatgcgcccgaaccagatggttctgaccagcattgactgcccgacttgtggtcgcaaaatggggattcgcacagcgagcaccggggtattccttggctgttctggctatgcgctgccgccgaaagagcgttgcaaaaccaccattaacctggtgccggaaaacgaagtgctgaacgtgctggaaggcgaagatgctgaaaccaacgcgctgcgcgcaaaacgtcgttgcccgaaatgcggcacggcgatggacagctatctcatcgatccgaaacgtaagttgcatgtctgtggtaataacccaacctgcgacggttacgagatcgaagagggcgaattccgcattaaaggttatgacggcccgatcgttgagtgtgaaaaatgtggctctgaaatgcacctgaaaatggggcgtttcggtaaatacatggcctgcaccaacgaagagtgtaaaaacacacgtaagattttacgtaacggcgaagtggcaccaccgaaagaagatccggtgccattacctgagctgccgtgcgaaaaatcagatgcttatttcgtgctgcgtgacggtgctgccggtgtgttcctggctgccaacactttcccgaaatcgcgtgaaacgcgtgcgccactggtggaagagctttatcgcttccgcgaccgtctgccggaaaaactgcgttatctggccgatgcgccacagcaggatccggaaggtaataagaccatggttcgctttagccgtaaaaccaaacagcaatatgtctcttcggaaaaagacggaaaggcgactggctggtcagcattttatgttgatggcaaatgggttgaaggaaaaaaataacctttaattctgtcaggtttttataaacaaagggtcgcgaaagcggcccttttttattgcatattattttttcttcacacctatacactaaggctataaatgatatagtggttatagttagcaccttttttattattaaatcgtattagtcacccgccaggtgtgacgaaaaaacgatgttctgatggcgtctaagtggatggtttaacatgaaattacaacaacttcgctatattgttgaggtggtcaatcataacctgaatgtctcatcaacagcggaaggactttacacatcacaacccgggatcagtaaacaagtcagaatgctggaagacgagctaggcattcaaattttttcccgaagcggcaagcacctgacgcaggtaacgccagcagggcaagaaataattcgtatcgctcgcgaagtcctgtcgaaagtcgatgccataaaatcggttgccggagagcacacctggccggataaaggttcactgtatatcgccaccacgcatacccaggcacgctacgcattaccaaacgtcatcaaaggctttattgagcgttatcctcgcgtttctttgcatatgcaccagggctcgccgacacaaattgctgatgccgtctctaaaggcaatgctgatttcgctatcgccacagaagcgctgcatctgtatgaagatttagtgatgttaccgtgctaccactggaatcgggctattgtagtcactccggatcacccgctggcaggcaaaaaagccattaccattgaagaactggcgcaatatccgttggtgacatataccttcggctttaccggacgttcagaactggatactgcctttaatcgcgcagggttaacgccgcgtatcgttttcacggcaacggatgctgacgtcattaaaacttacgtccggttagggctgggggtaggggtcattgccagcatggcggtggatccggtcgccgatcccgaccttgtgcgtgttgatgctcacgatatcttcagccacagtacaaccaaaattggttttcgccgtagtactttcttgcgcagttatatgtatgatttcattcagcgttttgcaccgcatttaacgcgtgatgtcgttgatgcggctgtcgcattgcgctctaatgaagaaattgaggtcatgtttaaagatataaaactgccggaaaaataatttcttgcgttattttcggcaccttttatgtagcgaaggtgccggaatatattctcttttgttacttatttctataccgtgcacaatatttttatccctcatatttatagggtaaattacctgtaaagtagtgtctaattacccgcctcgcaaactccagttttcaaatatctatttcaggtcaaaagattgaattattcactggagacgattcgtaaattcgctggatttttgactaaagtttctttaggatttgtctcatcgtatgattaattacaccaatcgttcaacgtcttgctgataagtgatggcgattatatgaggttagcaatgccttctggaaatcaggaaccccgccgcgatcctgaattaaaacgtaaagcctggctggcggtttttcttggttctgcacttttctgggtggttgtcgcactgctgatttggaaagtgtggggataactatggtcggtcaggagcaactggagtcgtcaccattatgccagcatagtgacaatgaaacagaaacgaaacgggaatgttccgtcgttattccagacgactggcaactaacatcgcagcagcaagcctttatagaactgtttgctgaagatgatcagccgaaacaataattatcatcattcttattacccatttttaatgaattaaagggcttttaatacaccgcagcaataacagcttgagttatctcaacacaaaataataaccgttaagggtgtagcctatgatcaacacaaatatgaaatattggtcctggatgggcgcgttttctctgtcgatgctcttctgggccgaactcctctggatcattactcactgatccttgaccccgctgcggcggggttgtcatttgctttgccacaaggtttctcctcttttatcaatttgggttgttatcaaatcgttacgcgatgtttgtgttatctttaatattcaccctgaagagaatcagggcttcgcaaccctgtcattaaggaggagctatgtcgtcaaccctacgagaagccagtaaggacacgttgcaggccaaagataaaacttaccactactacagcctgccgcttgctgctaaatcactgggcgatatcacccgtctacccaagtcactcaaagttttgctcgaaaacctgctgcgctggcaggatggtaactcggttaccgaagaggatatccacgcgctggcaggatggctgaaaaatgcccatgctgaccgtgaaattgcctaccgcccggcaagggtgctgatgcaggactttaccggcgtacctgccgttgttgatctggcggcaatgcgcgaagcggttaaacgcctcggcggcgatactgcaaaggttaacccgctctcaccggtcgacctggtcattgaccactcggtgaccgtcgatcgttttggtgatgatgaggcatttgaagaaaacgtacgcctggaaatggagcgcaaccacgaacgttatgtgttcctgaaatggggaaagcaagcgttcagtcggtttagcgtcgtgccgccaggcacaggcatttgccatcaggttaacctcgaatatctcggcaaagcagtgtggagtgaattgcaggacggtgaatggattgcttatccggatacactcgttggtactgactcgcacaccaccatgatcaacggccttggcgtgctggggtggggcgttggtgggatcgaagcagaagccgcaatgttaggccagccggtttccatgcttatcccggatgtagtgggcttcaaacttaccggaaaattacgtgaaggtattaccgccacagacctggttctcactgttacccaaatgctgcgcaaacatggcgtggtggggaaattcgtcgaattttatggtgatggtctggattcactaccgttggcggatcgcgccaccattgccaatatgtcgccagaatatggtgccacctgtggcttcttcccaatcgatgctgtaaccctcgattacatgcgtttaagcgggcgcagcgaagatcaggtcgagttggtcgaaaaatatgccaaagcgcagggcatgtggcgtaacccgggcgatgaaccaatttttaccagtacgttagaactggatatgaatgacgttgaagcgagcctggcagggcctaaacgcccacaggatcgcgttgcactgcccgatgtaccaaaagcatttgccgccagtaacgaactggaagtgaatgccacgcataaagatcgccagccggtcgattatgttatgaacggacatcagtatcagttacctgatggcgctgtggtcattgctgcgataacctcgtgcaccaacacctctaacccaagtgtgctgatggccgcaggcttgctggcgaaaaaagccgtaactctgggcctcaagcggcaaccatgggtcaaagcgtcgctggcaccgggttcgaaagtcgtttctgattatctggcaaaagcgaaactgacaccgtatctcgacgaactggggtttaaccttgtgggatacggttgtaccacctgtattggtaactctgggccgctgcccgatcctatcgaaacggcaatcaaaaaaggcgatttaaccgtcggtgcggtgctgtccggcaaccgtaactttgaaggccgtatccatccgctggttaaaactaactggctggcctcgccgccgctggtggttgcctatgcgctggcgggaaatatgaatatcaacctggcttctgagcctatcggccatgatcgcaaaggcgatccggtttatctgaaagatatctggccatcggcacaagaaattgcccgtgcggtagaacaagtctccacagaaatgttccgcaaagagtacgcagaagtttttgaaggcacagcagagtggaagggaattaacgtcacacgatccgatacctacggttggcaggaggactcaacctatattcgcttatcgcctttctttgatgaaatgcaggcaacaccagcaccagtggaagatattcacggtgcgcggatcctcgcaatgctgggggattcagtcaccactgaccatatctctccggcgggcagtattaagcccgacagcccagcgggtcgatatctacaaggtcggggtgttgagcgaaaagactttaactcctacggttcgcggcgtggtaaccatgaagtgatgatgcgcggcaccttcgccaatattcgcatccgtaatgaaatggtgcctggcgttgaaggggggatgacgcggcatttacctgacagcgacgtagtctctatttatgatgctgcgatgcgctataagcaggagcaaacgccgctggcggtgattgccgggaaagagtatggatcaggctccagtcgtgactgggcggcaaaaggtccgcgtctgcttggtattcgtgtggtgattgccgaatcgtttgaacgaattcaccgttcgaatttaattggcatgggcatcctgccgctggaatttccgcaaggcgtaacgcgtaaaacgttagggctaaccggggaagagaagattgatattggcgatctgcaaaacctacaacccggcgcgacggttccggtgacgcttacgcgcgcggatggtagccaggaagtcgtaccctgccgttgtcgtatcgacaccgcgacggagttgacctactaccagaacgacggcattttgcattatgtcattcgtaatatgttgaagtaacaactatttgcttgccggttattttgcttccggcaagcaaatgaattacacaatgcaagagggttatttgttcagcaaatggcccattttctcggctttggtatcgagataatgttcgttattggggttacgacctacaatcaatggtacgcgttcaacaatattaatccctgcttcggtcagaatttcgacttttttcgggttattggttaacaagcggacttcattgacgccaaggagtttgaacatatcagcgcaaagagtgaagtcgcgctcatcagcggcgaagcctaactggtggttagcctctacggtatcgtaaccttgatcctgcagtgcgtaagcgcggattttattcagcagaccaatgttacgaccttcctgacggtgatacagcaaaataccacggccttcctcggcaatttgcgtcaatgccgcttcgagctggaagccacaatcgcagcgcaagctgaacagggcgtcaccggtcagacattcggaatggacgcgcgcaagtaccggggtatgcccggaaatatcgccatagactagcgcgacatgatcgtgtccggttgccagttcttcaaatcccaccatcaggaaatcgccccatggggttggcagtttggcttctgccacacgtttaagctgcatgaaattctccagataatgctggttctgtattggcttattttgccataacgagaaggggttcacctaatcacgacgcgtcgatcgttcacggaatggcacaaatctgtcaatttttcctggaactggcgttttcagttatgattgtgggacttatcaaaaaggagaggccatgcgttcgattgccagacgtaccgcagtgggagctgcactattgcttgtcatgccagtagccgtatggatttctggctggcgttggcaacctggagaacaaagttggctactaaaagcggctttttgggttactgaaactgtcacccagccctggggcgtcattacacatttgattttattcggctggtttctctggtgtctgcgttttcgcattaaggctgcctttgtattatttgccattctggcggccgcaatccttgtgggacaaggcgttaaatcctggatcaaagacaaagtccaggaaccacgaccttttgttatctggctggaaaaaacacatcatattccggttgatgagttctacactttaaagcgagcagaacgcggaaatctagtgaaagaacagttggctgaagagaaaaatatcccacaatatttgcgttcacactggcagaaagagacggggtttgcctttccttccggtcacacgatgtttgctgccagttgggcactgctggccgttggtttgctgtggccgcgtcggcgaacgttaaccattgctatcttgctggtctgggcaacgggagtcatgggaagccgcctgctgctcgggatgcattggccacgcgatctggtagtagctacgttgatttcgtgggcgctggtggcggtggcaacgtggcttgcgcaacgaatttgtgggccattaacaccacctgcggaagaaaatcgcgaaatagcgcaacgagaacaagaaagttaacgctggttgattttccgaatttagcccttaaatcatcaacaatgcgtgtggatgccatttcgcagacggcgcgaaaatggtactttaaagggctattgcggtaagttgaccataatttattcgctctaaccacataacgggaagtaatgtgaaatatttactcattttcttactggtgttagcgatcttcgtgatttcggtcacgttgggtgcgcagaacgatcaacaggtgacgtttaattatctgttagcgcaaggggagtaccgtatttccacattgctggcggtattgtttgctgcggggtttgctatcggttggttgatttgtggcctgttctggctgcgagttcgtgtttccctggcgcgcgctgaacgtaaaataaagcgactggaaaaccagctttcacccgcgactgacgtggctgtagtgccgcactcgtcagcggcgaaggaataactttctatgctggagttgttgtttctgcttttgcctgtagccgctgcctatggctggtatatgggccgcagaagtgcgcaacaaaacaagcaagatgaagccaaccgcttgtcgcgtgattacgtagcgggggttaacttcctgcttagtaatcaacaggataaagcggtagacctgtttctcgatatgcttaaagaggatacaggcaccgttgaagcccaccttacgctcggaaacctgttccgttcgcgtggcgaagttgatcgcgctattcgcatccatcagaccctaatggaaagcgcctcgctgacctatgaacagcgtctgttggcgattcaacaactggggcgtgattacatggccgccgggttatatgaccgcgcggaagacatgttcaatcagctgaccgatgaaactgacttccgcattggcgcgctgcaacagttgctacaaatctaccaggctaccagtgagtggcagaaagcaattgatgttgccgaacgcctggtgaagctgggtaaagataaacagcgcgtcgaaattgcccatttctactgtgagttagccctgcagcatatggccagcgacgatctcgatcgtgccatgaccttgctaaaaaaaggggcggcggcagataaaaacagcgcccgcgtatccataatgatgggacgcgtgtttatggcgaaaggagaatacgccaaagccgtcgaaagtctgcaacgcgtgatatcccaggacagagaactggtcagcgaaacgctggaaatgttgcaaacctgctatcagcagttgggtaaaactgccgaatgggcagaattcctgcagcgtgcggtggaagagaacaccggtgccgatgctgaattgatgcttgctgatatcatcgaagcgcgcgacggtagtgaggccgcacaggtctatattacgcgccagcttcagcgtcatccgaccatgcgtgtgttccataagttaatggattaccacttaaatgaagcggaagaagggcgtgccaaagagagcctgatggtgctgcgtgacatggttggcgagaaggtacgtagtaagcctcgttatcgttgccagaaatgtggttttaccgcatacaccctctactggcattgtccgtcttgtcgggcctggtcaaccattaaaccgattcgcggtcttgatggcctgtaatttttaaaaaaaatccgactttagttacaacatactaattattaatgttccattgtgctccggcaacgacggcgcagaaaaagcctgccaggggagaaatcgcaactgttaattttttatttccacgggtagaatgctcgccgtttacctgtttcgcgccacttccggtgcccatcatcaagaaggtctggtcatgacgttaactgcttcatcttcttcccgcgctgttacgaattctcctgtggttgttgcccttgattatcataatcgtgatgacgcgctggcctttgtcgacaagatcgacccacgcgattgtcgtctgaaggtcggcaaagagatgtttacattgtttgggccacagtttgtgcgcgaacttcaacagcgtggttttgatatctttcttgacctgaaattccacgatatccccaacactgcagcgcacgctgtcgctgctgcagctgacttaggcgtgtggatggtgaatgttcatgcctctggtggggcgcgtatgatgaccgcagcgcgtgaggcactggttccgtttggcaaagatgcaccgcttttgattgctgtgacagtgttgaccagcatggaagccagcgacctggtcgatcttggcatgacactgtcacctgcagattatgcagaacgtctggcggcactgacgcaaaaatgtggccttgatggtgtggtgtgttctgctcaggaagctgtgcgctttaaacaggtattcggtcaggagttcaaactggttacgccgggcattcgtccgcaggggagtgaagctggtgaccagcgccgcattatgacgccagaacaggcgttgtcggctggtgttgattatatggtgattggtcgcccggtaacgcaatcggtagatccagcgcagacgctgaaagcgatcaacgcctctttacagcggagtgcatgatgagtgattccaacagccgtctggtctactcaacggaaaccggacgtattgatgagcccaaagcggcccctgtacgccctaaaggcgacggtgtggtgcgtattcagcgtcagaccagtggacgtaaaggtaagggcgtttgcctgattaccggtgtcgatctcgatgatgccgaactgacaaaacttgcagcggaactgaagaaaaaatgcggctgcggcggagcagttaaagatggagttattgaaatccagggcgataagcgtgatttattaaaatcactacttgaagcgaaagggatgaaggtaaaactcgcaggcggttaacataaaaagccacggatatatccgtggctttcgaatattttactgtgcgtattattcagttatttcgtactgaacagaatcaagcgtattataattgcgagtcgataatcgacatttatttacgattatttaccgacctggtgaccaataacacctccgacagctgcaccacctaatgtacccaacgtactgccatcggtcagtactgcaccgcctaatgcccctgcacccgcgccgattgcggtgttgcggtcccgtttagaccagttagaacaggcactcagagacattgccaaagtaattgccagaacagccgcggtcatttttttgctcgttacaaacataatactctctcctgaatttatgattcacggaagtaagctctctataactataatagctaagaataagtctggtgaaattattccgtgaaatctgctcgcgcgcagggttatatcacgcaggtgataatgacttcctgttatatcgctgataataattttatatcttgagagtgttaataacaggtaaatagtcttaattatcaaccaggaatcatcttagagcggatgatttgccaaactgcaaatcatccgtagagaagggaaatggttaaatgtcaacgacgtgaatggtgagtttactgtgctcaagatgcatcagatcgctggcgcgtattttcgaatcggtaatcacgcgattgaatcgctcaacgggaccgatggagtatgaatgtacagcaccaaatttcgagctgtcagtcaggactatcgcttcgcactctttttccagcacggcattgaccacatcggtacgcatcatatcgcgaccggtaaatccagtttcaggttgccagccatcaataccaataaatgctttgctgaaatgcacctgttggatgcactggcgtgtcaaagggccaaccatactttcgctttttttctgatacacgccaccgagcaaaataacttcacaaggcgcgtctttcagcaaatgcgcgatgtagctgctgaccgtgatgatagtgacatttttcttctgctcgcccagagtccgggcgagtagggcattgctgctgccattttcgataaagatggtttcgcccggttgaaccagcgacgcggcaaactcggcgagttcacgcttcagcgtatagttgctcatcatacgggtttcgacgtcatcactatcaagcgaaacagcaaagccatgtgcacggcggaggtaactcagtttttcgagtgtgttgagatcctggcgaatggtaacttcagaaactccagtggcttttgccagatcggttacgctaacctgaccctggtcaatgaccatctgtagaatagtttgttgtcgggaattcatcgctgtaattcttataacgttataatacttaataaaaaaatactgacgcgccgggcatcctcaaataggaaaacctgaaggcacgattgttaaatctcccacggtgccttcgggatgtctggcgtagattcagcaacctggcgcaagagttctgctttaagtatctcgagattatggatcgcagagtggtaatcgcctgccacaaggatatctaacacaatatcaatacgttcggcaacgcgctgggcatcaaattcagacatcaaggacatccttatagcaaaagggggaaaatgaataatgcaaaaattgccgctaaaagagaagtgtttaacagcaacggctaattatcatccaggaatacgatatataatgacgggatatagcgctaagtatatatattcatctacttatgcgcgcttcagatagcgtttataccagcgttcgaaggcgacggcgggcatcggtttggcaaacaaaaatccttgccgctcattgatcccgttcttggttaaaaaagcatcttcctttgcactctctacaccttcggcgatcacctgaagattcaatgcctgggccacagcgacgatcgcccggaccagtgactgcgagacaggttgtttgtgaatatctcgaacaaaaacctggtcaagtttgatggcatcgatcggaaagcgcgccagttgcgaaagtgaagagtagccggtaccaaaatcatccagatgcacttgcgcacctagttggctaaattgttgaataacagacagtgccagttcatcattctcaatcagacaactctctgtcagttcaacatctatagggcagtattcaaaattgagttcctggagaacctgtttcagggcggtgaaaatggtttgatcggcgagctgacgtgcagaaatatttaccgccactcgcaggtttatgcctttatcccgccactttgccacctggcgtacgacatcgagaatcacccaacggcctaaaggcacaattagccctgactcttcggcgtaggaaatgaagtccaacggtggaatcaacccacgttcaggtgactgccaacgtactagtgcttccagactgcgcacttcgccacgccaggtgattttcggttgatagtgaataaccaactgatcgttttccagtgctttacgcaagttggtatccagccagagatattcaaatacccgttgattcatttctggggtaaaaacgcaaaattgtcctcgtccgccttccttcgctgtgtacattgctgtgtcggcgtgacgaataatagccgtgctgtctgaaccatgttcgggagagagtgcaatacctactgaacagctggtataaacttcaattaaaccaatgcgaaaggggagccgtaagcgggtcaaaattcgtgatgccattgcttccagcgcgctttgtgaggtgttggatgccagtaccagaaactcatccccacctggacgcgccaacacctggtcatgttcgagacagcttaaaatagccaatgacacgtcgcgtaataactggtcaccaaacaaatgcccataggcgtcgttgacctttttgaaattatccaaatcaagatacacaaccccaactttattgttatctgcatgattaatagcgtgatcgattaaatcctgcattgcgttacgattcggcagtccggtgatactgtcggtatttgccagaatacgcagtcgctcctgagcgcggcgctcttcggtaatgtcggtgccggaacagattaaaaaaatctcgtttttgccactgccgctgtggacaaatttattgcgaaacagaaacagccgctggcctttacatgttggtatccacagttcgacttcatatgcattgccgcttcgaaaaaatacacggttattgcgcctggatgccgcagcttcacgacggctcataaacagtttaaacacgctttgcccaatgacgtcgtgttctttcaaccctgtgtaatcttcacataaccgattgaagcgttggatattcccccggctgtcgagaatcactattgcggaatgtgcttcagaaactacctgctcagcaaaggaaagcccgtgtgataaatcacgagcaaccgccggtgtgtcatgccatgcagacgcgttgccagcccattcccgtttattgatttttcgtcctaccagatgcacagaaagatcgctttcatcgacggtcagactcatcatcaggctggaggtgatgaccgtcatttccctgatgcgagcagcctgttcggcagataactgcaatgtacgatcaggttctgtggtttcggtggtagaaaagcgcaaaacatcgctgctttccgtcaaccgccagtatggattgtgcgatccgagaaagttgtacaacgttgtggactccctaacggttttcatgatgcatatcctccggttaacagcggagtccgcggttaaataaaaggaacaacatgacttacatgaaattaacggcggctaaacgcattgttttttttatatatttatttgtaatccagttttggaaaaacgccagttttcaaacgaaagtcagttaaaaaatctgcctggatataacgaaggtagagcggggaaataaacggcccatccatgaggaatgggccgtgaaaggagattacgcgaccgggcgcgcaataatgctgcgggtttccatgcggacttcggcaatagtgacgtcaataacgtcagtcactttgtaaaccgtttcacctttaatttgtacagtgccgttttcctggctgcaaaccagttcatcgcgcacagcgtgtaagaaaggtgccggaataaaggcgatagcgccgttatcaaccaaacgaacacgcatgccgccacggctgatatcgacaatttccgctgcgaaacgggtgtcggtcccggctttgtctttcaggaagcgtgcgtataaccagtcaccaacatcacgttctgccatccggttgagacggcgacgctcggccatttggacagtgatttcatcctgtgggcgcgtcgcagtttcgcctttgataaccgctttcagcagacggtggttgatcatgtcgccatatttacggatcggcgaagtccaggtggcgtatgcttccagaccgaggccaaagtgaggaccgggttcagtgctaatttcagcaaatgactggaagcgacgaatgcggctgtcgaggaaaccagttggttgcgcgtccagttcacgacgcagtttgcagaaaccgtccagcgtgagcacttcttcggcatcgacatgcagaccgtgcgttttcagcaacgctgccagcgcgtcggcattcgccggatcaaagcccatatgcacgttatagatgccaaaaccgagcttatcgcgcagtacgcgggccgcacaaatgttagcggcaatcatcgcttcttcgacgatacggttggcaatgcgacgaggctcggcgacgatatccagcacttcacctttttcaccgagaataaagcggtaatccgggcgatctttaaacaccagtgcgtggttatgacgccactcgccgcggcgttggcaaatttgcgctagcaaacggacttgttcggcaattgcttcactttcaggctgccagtcaccggtattttccagccagtcagaaacctggtcatacaccagctttgctttggattcgatggtggcggcaaagaattcgatattatcttcaatggtgccatcagcggagagcgtcatgcggcatgccagtaccgggcggacttcattggcgcgcagtgagcagagatcgtcagaaagctcgcgaggcagcatagggatgttgaagccaggcagatagttggtgaatgcgcgaattttcgcggctttgtccagcttgctgccttcagcaatccacgcggttggatcggcaatcgccacaatcagctgaagtttgtcatccggcaacgccttagcgaaaagggcgtcatccatatcttctgtgctggcactgtcgatggtgacaaaatccagcgcggtcagatcttcacgaaccagaccttcatcgagcatttcggtagcgacgccgtctggtgcttctttttccagattatggcgtgcaagggtaacccaccacggtacaaagtgatcgtcaccaaaagtgatgtattgtgtcagttctgcatagaaagaacgatcgcctttcagcggatgacggcgcatttcggcaaccgcccagtcgccttctttaaactcgtggttcaggccacgggctgcgcggcaaggaatggcgtcttttaagagtggatgatcaggaacgatggccagacggtcatttttgccctgaaccttacccacgaaacgagtcaggaacggttcaaccagttcttctggctctgcggattcacgttctttttcactgtggatcaccgcgataattcggtcgccatgcatgacttttttcatctgcggcggcggaatgaaataacttttttgcgcgtcgacttccaggaagccaaagcctttttctgtggcttttaccaccccttcagcgcgtggcgtctgggaatgcagttgctgtttaagctgcgctagcagcgggttgtcctgaaacataattgtctattttggtggccattagagcggctgacagttttacgcgaatctgtctgacgcggcaaggttaatatgtctcacccaacgcgatttttaagcgatttatccagccacacagcccgctccataccagcagattaataatctgcgttgatgatttttcgtgttcgagtaaagggctgaactgggcggcgctaaagcgatcgggtgctcgggtcagccattgtatcgcctgaacggtagcgcgctcaacagaatgacggtcagcccattggttaatttcattttcgcccttgcgcataagggtgctgatttttttatattcatttgatgaatccatacaggtggcaaaacaagcaggactgccatttatacgcgcgcataacaacgccgcaagctgattatccggctgtgtattgccccgtgtgctgtttaacaacttttcgagaagggaaagtgaaatagggtggagagagagtatttcggccagttggcaaagttctgcagttgaactttttgtgtgctcttcaggtagtttttccacctcatagctgcttcgccagcgtaatgattcatcagcaaacagtgacgcgtcggcgtagttttgtatctccagcccgggtaaccagcgtaccggatgcccgagataagcctgaaatgtcgcaattgtccgcgcctgaaagccaataaaaccaatgatttggctaatgatcacacagtcccaggcagtaagaccgacgtcattcagatgctggcgcgatcggttgtcgataatagaaggcgagctagccagttggcgggcatattgcgtgatttgtgccaaccgatgattactttccctggtggaatcaggcccggggagcggcgtaagtcgcgccgaatagtagttacataaccgctggacgccgcaaacctgagcaaccgtcagggccgtcgacaagcgttcataagcggtgaaggtctgtgaacgggtcacggtaagctggtcagggaacaaatccactgcaagaacacgcgcagggtccagccatgaaaggaagggggccagcgtttctttttcaaggatcacgtcgagtagaaagggatcgctgacctttgcggcttccgggaccagaggcagaacgtcatactccgtagtactggattgcgtttcatgataccagtggcttttgccggtgatgtggcgttgttccatgggcgctccttggtcgtaaaggaaatcgttatcctgacgcaaggcgggaaggggagaaagacggatcggcgataacaaatatcagaaaggtataacagagataacgggcggcagaacgccgcccatctttaccaacagaacgattatttcagttcgagttcgttcattgcagcaatgctgaaaccgccgtcaacgtggaccacttcaccggagataccggcagagagatcggagcacaggaatgccgcagagttacccacatcttcaatagtaacggtacggcgaatcggggtaacggcttcgcaatgagccagcattttgcggaagtctttgataccggaggccgccagagtacggatcggaccagcagagatggcgttaacacgcacaccttccggacccatcgcgttcgccatatagcgcacgttcgcttccagagacgcttttgccagacccataacgttgtagttcgggatagcgcgctcagcgccaaggtaggaaagggtcagcagggcagaacccggattcagcatggagcggcaagcttttgccattgcaacgaagctgtaggagctgatgtcgtgggcaattttgaagccttcacgggtaacggcgttaacatagtcaccatccagctgatcgccaggtgcaaaaccaatagagtgtacgaaaccgtcaaatttcggccaaactttccccagttcagcgaacatggtgtcgatgctggcatcttctgcaacatcgcactgcagaacgatgtcagaacccaattgagcggcaaattcttctacgcggcctttcagtttgtcgttctggtaggtgaatgccagttcagctccttcgcggtgcatcgcctgagcgataccgtaggcgatggatagtttgctggcaacaccggttaccagaatgcgcttaccggaaagaaaacccatagctttaatccttattgttgatgcttgttgtgcctgaaaatcaggcgattcgtcgttttagtaaacagtacgaacagataaacggttattataatcaacctggctgtgagtagctatagttgccaggtccgaccggagcaggctgcggcagggggggcgcttttcccctcaccctaaccctctccccagaggggcgaggggaccgtattgtgcaaatattgttaccccagcaacaaacaggctcatacagcccctaaccctttcatggcgatggctgggacggttcagaccttgccgaatattctccagcaccgtctccatgttttcaccacaacagctattcggctcggtctgccccctcgctctttcagggagagggtgaccggcggttcagttcctgcagaatattctccagcaccgtctcctcattacaatcaatctcgttattccagaaacgcagcacggtccagccctgcgactcaagccagctagtgcgcctggaatcataggcaactgctaaatcatgctgcccaccatccagctcaacgactacacgcgccgagcagcaagcaaaatcgagaatgtagctccccactggatgttgacggcgaaatttgaaatcactaaaacgtcggctgcgaagatatcgccagagctttcgttcctgcaaagtgagattgcgtcttaaatcacgcgcatttgatttaattttatctatcacctcattctgacaagatttaatcttttgtcagaatgaggtgaataatctggaaggaggattcagaaaattagcgatctttacgccacgcatccgccgtcaatgcctcgccaaaatgaccggcaatcagccgtttggtgagttcatgcagcggcgatgccagcacatccgcggtgctgcctcgctcgacaacctcgccctgatgcatcaccagcacctggtcgctaatgtgcttcatcattccgatatgctgggtaacataaatatacgaaatgccctgtttttcctgtaattccagcatcagattaatcaactgcgaacgcatcgacatatccagtgaagcgagggcttcatcggcaataatgacttttgggcgcaatatcagcgcgcgcgccagacccagacgctgtttttgtccgggtgccaacatatgcggatagtaactgacgtgatccggtagcagcccaaccatacgcatcgtttcaataatctgtttgcgacgctgttccggttccaggtcggtgttcaggcgcagtggaaaatccagaatttgcgagatacgttgacggggattcaacgaggtcgaaggatcctgaaaaatcatgcgaatacgctgactgcggaaggaataatcgccaaaatgcagtggatgatcgtcaatcaataactcgccgctggtaggctctatcattcccgccagcatttttgccagcgtggatttacccgaaccattctcgccaataatcgccagtgtctggccttcacgtagcgtaaagctcaagggttttaccgcttctacggtctgacgacgaaaccagccggtccggtagcggaacgttttacttaaattacgcacttcaagcagcgtttcgatcatctcactctttctccatgttcagcgggaaatgacaggcatagagatgatttttcgcccccgtcaaacgtggcgtcacaatgcattctcgttgtgcatacgggcaacgtggccccagacgacaaccaatcggtaactgttccagcagtgggatagcgccgggcagcgtattgaggcgacttttatgcggcatcgcgctgccgaagtctggtatcgcgcggatcagcgcctgggtataaggatgatgtggcatcgtcaccaactccttactcggcgcggtttccactgtttgaccgcagtaaagcacgttaattttatccgcccattggctaagcatttgtaagtcatggctgataagcaaaatagtggtattgctgttttggttgagacgcgtcagcaggcgaaagatttgcgcctgggttgttggctccattgagttggtcggttcgtcagcaatcagcagacgcggttgattcgccagtgcaatggctatcatcactttctgacattcaccttcggtcaactcatagggaaaactgcgcatcgcatctttgtgatctttaatccccacgcggtgcagcagttcaatggcacggcgtttgcgccagccaaaacgctgccaccaacggcctttataggtccaggctgggatgttttgcatcaactggcggcccacacgttctgaagggtcaagacacgactgcggttcctggaaaatcatcgacacgttatggccaaccagtttgcgccgttcgcgtgcggagagacgcagcaaatcgatatcatcaaaacgcatacggtcagcagtaacacgccagttatctttattcaccccacaaatcgctttcgcaatcaaactcttgccggaaccggattcaccaacaagaccgcggatttcaccttcggttaaggtcatacttacccggtcgacggctttaacccactcatcaccggttttaaattcaatggtcaggttacgaatatcgagtaatggcattattccacccccgcaataatcgcacgacgaacgccatcgccaaggaggttaaccaacaacacgctaatcataattgccgcacctggcagcatgacagtccacggggcgacataaatcagttccagcgcatcaccgagcatcgctccccattcaggcgaggggagttgtgcgccgagatcgagaaagcccagcgcggcgatatcgagaattgccatcgacagtgcgcgggtgatctcggtgaccagcccggcggtgatgtttggcatcacagcaaaccagagaatattcagcgttgatgcgccatccagacgggcggcgataacgtactctttttccagttcgtcatgcaccatgctgtaaatcgaacgtaccatacgcggcagcaatgccagccagacagcaaacatagcgtgggacaaactcggtccggcaaacgctacaacgataattgccaacagcagcgaagggatcgccagtaaggtatccagaatatggttaagcaccgctgagcggaggccgtgtgtcgccccggcgaaggtgcccagtaccaggccacagatcgtcgcggcaagcgtcaccacaaatgcgccacccacggttggcgcagctccgctcagtaaacggcttaaaacatcgcgtccgaggtcgtcagtccccaggaagaaagaaacttcgccatagcgcgaccatgacggcggcaataattgataaccgagaaattgctggtcgatgccgtaaggcgcaaaccagccgccaaaaatacacagtacagccagccccgcgcagccgtacaggccgaccatcgcagaggcgtcactataaaatttgcgccaggcggtacgcagcgtgcccggcgggcgcttttcgctgtatacgctatcgtaaggcataccattccttatgtttcagagggttagccatggcacccaaaatatcagaaatcacgttaacaataatgaccagtgagccacacaccatcactccggcggaaatggctgcgtaatcctgctggcggatggcgttaattaaccagcgccctaaacccggccagctaaaaaccatttcggtgatcatcgccagcgtcagcatggtggaaaactgtaagcccaggcgaggaataaccggcggtaacgcgttatgcagaacgtggcgacgcaaaatagtaaagcgcgacaaaccgcgggtcgccgccgcttttacatagttctggtcatacacttcgatagtgctgatacgcatcaggcggatcacttcagttgttggcgcaaccgacagggtgatcacgggcaatatcatatggcggattgcgctcatgatcatttcatcccgccatggtgagtccgaaagccaggcatcaatcaacgcaaaaccggtaatcggtttcacttcgtagagcagatcgaaacgccctgaaacgggcaaccaacctagcgtgagtgaacaaaacagcgtcaacagaagcgccagccagaacaccgggattgaaaagcccagtaaggcgatggcgttgatcaagttatcctgccacttatggcgcgtaatcccggcaatcatccccacggggatgccaacaatcagcgcaaaaccgaaggcgaggatgcacagttccatcgtcgccgggaagacctcttttaactgttcggcaatcggttgaccgttaatgctggaaacaccaaaatcccagtggatcaggccgttaaaccagaacacccaggcattccacagtgacgcgccttgtaacggcgcatgaggggtgaaatagctcaagctgaagccaacgaaggtcagcaggaacaaggtgacaatcaataacaaaatgcggcgtaaggtgaagataatcatggttttttcacctcatcctgtttctcgcgatacaccccagcaaaggaggcgttaccaaacgggctaagtaccagacctttgatatcgtaccgataggcctgcaaacgcaatgacgacgccagcggcaaaatgggcaattcctgcgccagaatactctgcgcttcgtcataggcttcaatacgcgccgccagctgctgcgaagagagcgccttacgcaatacgctgtcgaatttcggatcgcaccagtgggcgaggttggtctgcgaatgaattgccgcgcagctcagtaacggacggaagaaactgtccgggtcgttactgtccgtcgcccaaccggataacgtcagatcatggctcatatccatcaaccgcgcctcctgaaagcgaccttctaccggcacaatcaccacttttacgccaacctgcgccatatccgcctgaatcagttcggcagttttcagtggactggggttccacgcctgcgaacgtgtgggcacccacagtttcagcgttaaattttccagccccaacgacttcaactgttcgcgcgatttcgccggattgtattcagtaattttagcctcgttgtcataggcccacgaggcgcgcggtaaaatagaggccgccgtttcagccgtaccataatagatggattgcatcaggcgctggttattaatcgccagtgccagcgcatggcggacagcgggattatttagcggcggtttggcggtgttaaatgccagataggcgacgttcatcccaggacgcagcgttaaacgcaagcgcgggtcgtcacgcaaaatggatagctggctggcagcaggccaggccagaacgtcgcattccccggtcaggagtttcgacagacgtccggtgccgccggagcctaaatccaccactacctgcggcattaacggtttaccgcgccagaagtcatcatgacgttgtaggcgaataaattgcccggcgcggtattccgacaactgatacggaccggtgccgaccggttgacggtcgagttgctcctggcgatcttctttctctaacttccgggcatattctgccgacatgaccgaagcataatgggttgcgaggtgccacaaaaaagaagcatccggctgggcgagtcggaactcaacggtatgattatccagtttgcggacgcttttcacgttatcggcaaattgcaggctgtcgaagtaggggaagttgctgccgttgacgttatgccacgggttgttgcggtcaaaaattcgctggaaggtaaacaccacatcgtcggcattcattttacgagtgggagtaaaccagtcggttttttgaaacggaacatcgcgacgcaggtggaagcgataggtcgcgccgttgtcgagtacttcccagctttcggcaagttccggcatcaggcgataggtatagggatcgacatccagcagtcgatcataaaactgggcggcaagggtatcgacaattaacccactgctcgctttggatgggttaaaggtgttgacttgcccgctgacgcaatagacaaaaccgctgtcgcggatatcagcatgcgggggagattcaggcgcggcgattgcctgaccactcacaagtccagcaatcaccaaaagagacgataatacctggcgcataatattaagggattttatgtaaagaggctatcttactaatatttaatgacatttgccattaccgtttgtgttcaggggtcgtaatgagggccgtgtggttggtcgttgaacaggtgacgtcgccatctgttcaacattcgtacccgtgatttctctataactataactcacagaacaacttagcgaggagcagagcggtacgatcgtgagaaacccattaaagcacgctgcagtgcgtgtcattgttagccagatgcggcgtgaacgctttatccggacaacgatactgaccgatcgtctgcaattaaatcattactcattaccccattgattcaaaaactctgcgatctcatcaatgcgtacgggattaatccccgcttcagcagccatttcatgttgggcttcttcgctgatctcttcattgttcatcaaacgggtgagcagtaactggaagtagtgggccagcggtgtgcgttcagcctctgcgacaggctctgcgcattcggtcgcgtactcatcggcaatatcaaaatattttagcgggatatcgtggttcattatttgcccctggggttaatgcgctaagcataagggcggatgatagcactcgtgatccgggtcatacatctttttatagttaatggcgcggcgcgttaccctcaggcaggataatgcgccgcgcatccgactattacgtttcactcaccggcgttctgtcaccatcatacaacggcactttgcgatagcggcggatcagataccataaatatgcgccgcctaacgaagcccataccagaccgagtgtcagtgacgttgactcgaggttaacccacagcacacccaccgtcagcgcgccaaccagcggcatcagcaaatagtggaagtgatccttccagcttttattcattcctttacgccgccagaaatgattaaacaccgacagattcacgaaggtaaacgccaccagagcaccgaagttaattaacgctgtggcggtaactaaatcgaagaacagcgccgacaacgcgacaatcccgaccataatgacgttgagtgccggagtccgccattttgggtgcacatagccaaacacgcgctccggaaacacattgtcacgccccatcacatacagcagacgcgacacgctggcatgtgaagccaggccagaggctaacgtgttcacaaacgtggtgcagaggaaaatcgactggaagagcttgccgccgacgtacagcgcaatttcaggcagtgcggcatccggatctttaaagcggctgatatcgggaaagaacagctgcataaagaacgacgccgcgataaagataacgccaccgtagaccgccgtcaggaagatggctttcgggatcacgcgtgcggcgtccggcgtctcttccgaaagcgtggtcaccgcatcgaaaccgaggaaggagaaacagacaatcgtcgccccggtaataatcgggatcaggtgcgcgttctcgctgataaacggctgaagtgaccagacggtgccaacgccttctcctttatgcagtccctgaactaccaggaagataaacaccaccatgatggagatttgcaccagtacaaacagggtattgaagttagcgaccaggttgacgctcttcagattcgcggcggttaaaatggcgacgaaggttaccacccacacccacggcggcacttccgggaagagggcggagagatagattttcgccaacaagacgttaatcatcggcaaaaagagataatccagcagcgatgaccagccgaccataaatccgacgtgcgggttaatcgacttttgcgcgtaggtataggccgaaccggcctccggaaactggcgaaccagtttgccgtagctgatagcggtaaacagcacacccgccagcgccagcaaataggacgccggaacgtgaccgtcgctaatgccggagacaataccaaaagtatcaaatacggtcatcggcgtgagataggccagacccatcatcaccacctgccacaatttcagtgattttcgcagacgggttttgccgggttgcgcagcaatattcagtggtgaattaatagccataattgctgcctcccctgcgtaataaggtttgcggtcgtgtcgacctgaaatcaaacctgtttagcaagggaagcaaagggggcggagtccagtcagtagcaggaggggcgcatacgcagcctccctcgccatgcggggatttaatcatcggcatcatctcatttcctcgtcacagtcttaatcgttaacggaagcccgttgccgcccgcgctccataacgcgacatccgggaaatgtctggattaccagcaaatgtcaggcctggctccgctcaggccgatgaaacaaccccgcaaggggtattacgcgtttttcaacatccactcaatttctgtttctgtgatgaggcgctcaaactgcaacagctcatcatttttacaggcgtgatagacatggcagaagcgttcgcctaaatagcggcgcaggtgatcattctcgataaactcacccagggcatcgctctggcgaatcggaaagggtaagccttcctgttccagcccgttgccttcgacttcttcctgcaacggcagctcgttatcaaggccatgcaaaataccggcaaaaatcgctgccatcaccagatatgggttggcatcggcacccgccacgcgatattccacgcggtgattatgacggtcgccgcacggaatacgcagggcgacggtgcggttgttatggccccacgacgcctgcgtcggcacatacattcccggctggaagcggcgatacgagttcacgtttggtgccagcaacgccatcgacgacggcatcaggtcaatcatcccggcgagcatctttttcagcagcggcgaatcttcgccttccgcgtcagaaagcacgttctcgccacgattattttgcatactgatatggatatgcattccgctgcccgcgtgctcttcatacggcttcgccataaaagtggcgtgcatcttatgcttttctgccatcagacgcaccaggcgttttagtgccagcgcatcatcgcaggcttccagcacgttatcagtatggtaaaggttgatttcaaactgacccggcgaggcctcagcgaccgcgccatctgccggaatcagctgtaactgcgccagttcatcaatatcattgagcacgtcggcgaagtggttgaggttatcaacggagtaaacctggctttgtgtattgcggtcatcggtgccaggcgcgcagggcggttgcagatacccttcagcgtcgcgctggcgatccagtaaatagaactccagctctaccgctacgaccgggaacaatccgcgctggcgcagctgctgccacaggcggttaagaacgttccgcggctcaacgtcaaagggagcgccatcttcatcgaccatggtcaggagcatctgaccgataaactctggatcggcggcagaaggagttaaggaaccgagaacaggaacacaggtacgatccggctcgcccatttcctgacccagacctgcttcttctactacgttgcccagaatatccattgcaaataccgaggccgggaaataacaccctttctcgagcttcttcaggcttgaaacaggaatacgctttccacggaagcaaccatttaaatcggtaagtaaaacatcaacatattgcgtattcgggtagcgctccaggtagcgtttcacttcctgcgtaaaggcgctaccccgcctctcttctgactgctgaacaaagttctctacttcaacgatattggtttccatgattcttcgcctttggtttgttttccgctcgttatcaaagcgtaaaatataatgaccaccattcgaatctgtatgcaaactaaatgtttgtcaaatgttaaattgagtttgcaaaaatgaaaacccactgctagattgaaaaaatattgaacataaaggtcatttaaagcgcagtaatggcgataatttagtccactttgtgagattgagcatggaaaatataatgaacaatccggttatcggtgtcgtaatgtgcaggaacaggcttaagggtcatgcgacccagactctgcaagaaaagtacctgaatgccatcatccatgcaggcggcttgcctattgcgctaccacatgcgctggcggaaccgtcattacttgaacaacttttgccgaaactcgatggcatttatcttcctggtagtcccagcaatgtgcagccgcacctatatggtgaaaacggcgatgagcctgacgccgatcccgggcgtgatcttctgagcatggcgataattaatgccgcactcgaaaggcgcatccccattttcgccatctgccggggtttacaagaactggtggtggcaaccggtggttcgttgcatcgcaagctgtgcgaacagcctgaattgctggaacatcgggaagatcccgaactgccggtggaacagcaatatgcaccgtcgcatgaagttcaggttgaagaggggggattactgtctgcgttgttacctgaatgtagcaacttttgggtaaactctctacatggacaaggggcgaaggtcgttagcccacggttgcgtgttgaagctcgctcgccggatggcttagttgaggcggttagcgtcatcaatcatccttttgcgctgggcgtacagtggcacccggaatggaacagtagcgagtacgcgctttcgcgtatattgttcgagggctttatcaccgcttgtcagcaccatatcgctgaaaaacagcgactctgaccactacagtttaaggaaatgcaaatatgagtgatgagggactggcgccaggaaaacgcttgtcggaaatccgccagcagcaggggctttcacaacgtcgtgccgccgaactctccgggctgactcacagtgctatcagtacgatagaacaagataaagtcagccctgccatcagtacgctgcaaaagctgctgaaggtgtatggtctgtcactctcggaattcttttccgagccggaaaaacctgatgagccgcaggtcgtcattaatcaggacgacttaattgagatgggtagtcagggtgtgtcaatgaagctggttcataacggtaacccgaatcgcacgctggcgatgatctttgaaacgtaccagccgggcacaaccactggggaaagaattaagcatcagggtgaggaaataggcactgtactggaaggtgaaattgttctgacgattaatggtcaggattaccacctcgtcgcggggcaaagttatgccattaataccggcatcccgcacagtttcagtaatacgtcggcaggtatttgccgaattatcagcgcccatacgcccaccacgttttaatctttttgttctgtaagccgggtaagcgcaatgcgcccggcaatctatacacaaaatcattcaagttgcatcaaggcggcaagtgagcgaatcccgatgagcttactcaggtaagtgattcgggggagcgaacgcagccaaggcagaggcggcttgaaggatgaagtgtatataaagaatgtcgccagaaataaacgggcatacggcccggggatctctgcgccctgacgttcacaaactgcatatatctgatagacgtgaaacaggagtcataatgaattttcatcatctggcttactggcaggataaagcgttaagtctcgccattgaaaaccgcttatttattaacggtgaatatactgctgcggcggaaaatgaaacctttgaaaccgttgatccggtcacccaggcaccgctggcgaaaattgcccgcggcaagagcgtcgatatcgaccgtgcgatgagcgcagcacgcggcgtatttgaacgcggcgactggtcactctcttctccggctaaacgtaaagcggtactgaataaactcgccgatttaatggaagcccacgccgaagagctggcactgctggaaactctcgacaccggcaaaccgattcgtcacagtctgcgtgatgatattcccggcgcggcgcgcgccattcgctggtacgccgaagcgatcgacaaagtgtatggcgaagtggcgaccaccagtagccatgagctggcgatgatcgtgcgtgaaccggtcggcgtgattgccgccatcgtgccgtggaacttcccgctgttgctgacttgctggaaactcggcccggcgctggcggcgggaaacagcgtgattctaaaaccgtctgaaaaatcaccgctcagtgcgattcgtctcgcggggctggcgaaagaagcaggcttgccggatggtgtgttgaacgtggtgacgggttttggtcatgaagccgggcaggcgctgtcgcgtcataacgatatcgacgccattgcctttaccggttcaacccgtaccgggaaacagctgctgaaagatgcgggcgacagcaacatgaaacgcgtctggctggaagcgggcggcaaaagcgccaacatcgttttcgctgactgcccggatttgcaacaggcggcaagcgccaccgcagcaggcattttctacaaccagggacaggtgtgcatcgccggaacgcgcctgttgctggaagagagcatcgccgatgaattcttagccctgttaaaacagcaggcgcaaaactggcagccgggccatccacttgatcccgcaaccaccatgggcaccttaatcgactgcgcccacgccgactcggtccatagctttattcgggaaggcgaaagcaaagggcaactgttgttggatggccgtaacgccgggctggctgccgccatcggcccgaccatctttgtggatgtggacccgaatgcgtccttaagtcgcgaagagattttcggtccggtgctggtggtcacgcgtttcacatcagaagaacaggcgctacagcttgccaacgacagccagtacggccttggcgcggcggtatggacgcgcgacctctcccgcgcgcaccgcatgagccgacgcctgaaagccggttccgtcttcgtcaataactacaacgacggcgatatgaccgtgccgtttggcggctataagcagagcggcaacggtcgcgacaaatccctgcatgcccttgaaaaattcactgaactgaaaaccatctggataagcctggaggcctgaaatgaccgaacataccagcagttactacgccgccagtgcgaataaatatgcaccattcgacacgctgaatgagtcaatcacctgcgacgtttgcgtggttggcggcggctataccgggctctcctccgcgctgcatctggcggaagcgggctttgacgtagtggttctcgaagcctcacgcatcggctttggcgcaagcgggcgcaatggcggacagcttgtgaactcctacagccgcgacatcgacgtgatcgaaaaaagctacggcatggacaccgcccgtatgctcggcagcatgatgttcgaaggtggtgagatcatccgcgaacgtatcaaacgttatcagattgactgcgactaccgccccggcggcctgtttgtggcgatgaatgataaacagctcgccacacttgaagagcagaaagagaactgggaacgctacggcaataaacagctggaattgctggacgccaacgccattcgccgtgaagtagccagcgatcgctataccggtgcgctgctggatcacagcggtgggcatattcatccgctaaaccttgccattggcgaagcggacgccatccgcctcaacggcgggcgcgtgtatgaactttctgccgtgacgcagatccagcacaccacgccagccgttgtgcgaactgccaaaggtcaggtgacggcgaagtatgtgattgtcgccgggaatgcgtatctgggcgataaagtagagccggaactggcgaaacgcagcatgccgtgcggcacgcaggtgatcaccaccgaacggctgtcggaagatttagcccgttcgctgatcccgaaaaactactgtgtggaagactgtaactatctgcttgattactaccgtcttaccgccgacaaccgcctgctgtacggcggcggcgtggtctacggcgcgcgcgacccggatgacgttgagcgccttgtggtgccgaaactgctgaaaaccttcccgcagctgaagggcgtgaaaattgattaccgctggacgggcaacttcctgctgaccctgtcgcgtatgccgcagtttggtcgcctcgataccaacatctattacatgcagggctacagcggccacggcgtgacctgtactcatctagccggacgtttgattgccgaactgctgcgcggcgacgccgaacgtttcgatgccttcgccaatctgccgcattacccgttccccggcgggcgcacgctgcgtgtgccgtttaccgcgatgggcgcggcgtattacagcctgcgcgatcgtctgggcgtttaatttccgattaaccgtgaagagtcaaaaggtgtgaaacatgagcaacaatgaattccatcagcgtcgtctttctgccactccgcgcggggttggcgtgatgtgtaacttcttcgcccagtcggctgaaaacgccacgctgaaggatgttgagggcaacgagtacatcgatttcgccgcaggcattgcggtgctgaataccggacatcgccaccctgatctggtcgcggcggtggagcagcaactgcaacagtttacccacaccgcgtatcagattgtgccgtatgaaagctacgtcaccctggcggagaaaatcaacgcccttgccccggtgagcgggcaggccaaaaccgcgttcttcaccaccggtgcggaagcggtggaaaacgcggtgaaaattgctcgcgcccataccggacgccctggcgtgattgcgtttagcggcggctttcacggtcgtacgtatatgaccatggcgctgaccggaaaagttgcgccgtacaaaatcggcttcggcccgttccctggttcggtgtatcacgtaccttatccgtcagatttacacggcatttcaacacaggactccctcgacgccatcgaacgcttgtttaaatcagacatcgaagcgaagcaggtggcggcgattattttcgaaccggtgcagggcgagggcggtttcaacgttgcgccaaaagagctggttgccgctattcgccgcctgtgcgacgagcacggtattgtgatgattgctgatgaagtgcaaagcggctttgcgcgtaccggtaagctgtttgccatggatcattacgccgataagccggatttaatgacgatggcgaaaagcctcgcgggcgggatgccgctttcgggcgtggtcggtaacgcgaatattatggacgcacccgcgccgggcgggcttggcggcacctacgccggtaacccgctggcggtggctgccgcgcacgcggtgctcaacattatcgacaaagaatcactctgcgaacgcgcgaatcaactgggccagcgtctcaaaaacacgttgattgatgccaaagaaagcgttccggccattgctgcggtacgcggcctggggtcgatgattgcggtagagtttaacgatccgcaaacgggcgagccgtcagcggcgattgcacagaaaatccagcaacgcgcgctggcgcaggggctgctcctgctgacctgtggcgcatacggcaacgtgattcgcttcctgtatccgctgaccatcccggatgcgcaattcgatgcggcaatgaaaattttgcaggatgcgctgagcgattaatagcccaacgcaataatgtctgatgcgctgcgcttatcaggcctgcaaacgacgtattgattatgtatgccgaataaagcattcacgccgcatccggcaagttgtattgctcaacttcgctaaatctggtgctttttcaacaacgcgcggaactgatgataagttaaccccagtaattcagccgcgcgcttctggttatatttcccttgttgcaaactgagttgcagcaactctttttcctgctgcatctgaaactcacgtaaatccagcggcagtgttggaagcgaggtggtttctgaaacggcgatagcgtcttcaggcggacgccgtttaaagggatcaataatgatgtcatcaagcggataatcgctggtgccgtggcgatacactgaacgttccaccacgtttttcaattcacgaatatttcccggccaacgataattcagcaatgtttctctggcgcgctccgtaaaccccgggaacagaggcagcttgatttcccgacacatctggatggcaaagtattctgccatcaacattatgtcgctttcgcgctcgcgcagtggtggcagttgtacaacatcaaaagccagtcggtcgagcaggtcagcgcgaaaagtgccttcattgaccatcgccgggagatcggcattcgtcgcgcataccaaccgcacattcacctgcaatggttggctgccgccaacgcgctccagttcaccgtactcaatcacgcgcaataatttctcctgcaccatcatcggtgccgtagcgagttcatcaagaaatagcgtaccgccgtcggcacgttcaaatctccctggatgacgtttttgcgcaccggtaaacgcccccgcttcgtgaccaaacagttcggaatccagcagattttcatttaacgccgcgcagttaagggaaataaacggcccttgccaacgggaggagagataatgcaggcggctggcaatcagctctttaccggtgccgcgttcgccgatgatgagcaccggtttgtccagcggtgcgagatgcgaaacctgttccagcacttcgagaaagctgttcgcctcaccaagtaaattatctttgtattctgccatgatgaaattcgccacttgttagtgtaattcgctaactcatcctggcatgttgctgttgattcttcaatcagatctttataaatcaaaaagataaaaaattggcacgcaaattgtattaacagttcagcaggacaatcctgaacgcagaaatcaagaggacaacattatgggtattttttctcgctttgccgacatcgtgaatgccaacatcaacgctctgttagagaaagcggaagatccacagaaactggttcgtctgatgatccaggagatggaagatacactggttgaagtacgttctacttcggcgcgcgcgttggcagaaaagaaacagctgactcgccgtattgaacaagcgtcggcgcgtgaggttgaatggcaggaaaaagccgaactggcgctgctgaaagagagagaggatctggcacgtgcagcgttaattgaaaaacagaaactgaccgatctgattaagtccctggaacatgaagtgacgctggtggacgatacgctggcacgcatgaagaaagagattggcgagctggaaaacaaattgagcgaaacacgcgctcgccagcaggcattgatgttacgtcatcaggcggcaaactcgtcgcgcgatgtgcgtcgtcagctggacagtggcaaactggatgaagcaatggctcgtttcgaatctttcgaacgtcgtattgaccagatggaagcggaagcagaaagccacagcttcggtaaacaaaaatcgctggacgatcagtttgccgaactgaaagccgatgatgcaatcagcgaacaactggcacaattaaaagccaaaatgaagcaagacaatcaataataacatccaggcggcgtccgaacgcgccgccgctcatcgtctaaggagtacttatgagcgcgctatttctggctattccgttaaccatttttgtgctgtttgttttaccgatctggttatggctgcattacagcaatcgttctggtcgcagtgaattgtcgcaaagtgagcagcagcgattagcgcaactggctgatgaagcaaaacggatgcgcgaacgtattcaggcgctggaatctattcttgatgcagaacatccgaactggagggatcgctaatggcgggcattaatctcaataaaaaattatggcgtattccacagcagggcatggtccgcggcgtctgcgccgggattgccaactattttgatgtaccggtaaaactggtgcgtatcctggtggtgctgtcgattttcttcggtctggcgctgtttaccctggttgcttacatcattttgtcatttgcgcttgatccaatgccggacaacatggcctttggtgagcagctaccttccagcagcgaattgctggatgaagtcgaccgtgaactggcggcaagtgaaacgcgtttacgcgagatggaacgttatgtcacttccgatactttcacgttacgtagccgtttccgtcaactgtgaggaaagttatgaatactcgctggcaacaggccgggcaaaaggtaaagcctggtttcaaattagcaggcaagctggtacttcttaccgcactgcgctatggcccggcgggtgtggcgggctgggcgataaaatcagttgctcgccgaccgctgaaaatgttgctggctgtggcgctggaaccgctgttaagtcgggctgctaataaactggcacagcgttataaaaggtgaggggagtttcgcaaaaattgttaaatctcaggcgtataatggatggcaattttcatccatagaaggacgcttacatgtttaaaaaaggcttacttgctctggcactggtgttttcactgcccgttttcgccgctgaacactggatcgatgttcgtgttccagagcagtatcagcaagagcacgttcagggggccatcaatattcccctgaaggaagtgaaagagcgcattgccaccgccgttccggataaaaacgacaccgtgaaagtgtattgcaatgccggacgccagtcagggcaagcaaaagagatccttagcgagatgggatatacccacgttgagaacgccggtggcctgaaagacatcgcaatgccgaaggtcaaaggttaaaagaattcaccatgagcggcgcttatgcgccgtttttttttctgtcacaccttatttacatccccatagattatttgcgtcagctcacaaatacgctttttccctggtaaaaaatgatttcctgcgtgactaaaacccttgtgctcaattgacagtttattttctgcggagtagtctctcgtttcatgggaccgctaccacggaaaggcaacatgaaacagaaaattacggattacctggacgaaatctacggtggaacatttaccgcaactcatttacagaaacttgtaacgcgtcttgagagtgcgaaacgattaattacacagcgacgtaaaaaacactgggatgaaagtgatgtcgtgttaattacctatgccgatcaatttcacagcaatgatttaaaaccattacccacatttaatcagttttaccatcaatggctgcaaagcattttttcacatgttcatttgttgccgttttatccatggtcatctgatgatggcttttcggtaattgattatcatcaggtcgccagtgaagcgggggagtggcaggatattcagcaactcggtgaatgcagtcatttaatgtttgattttgtctgcaaccatatgtcggcaaaaagtgaatggtttaaaaactatttacaacagcatccaggttttgaagatttttttattgccgttgacccgcaaaccgatctcagcgccgtcactcgcccgcgtgcgttaccgttattaacgccattccagatgcgcgatcattcaacgcgccatttatggaccacctttagtgacgatcaaattgacctgaattaccgtagccctgaagtgttgctggcgatggtggatgttttactctgttaccttgcgaaaggtgctgagtatgtccgcctggatgccgttggctttatgtggaaagagccgggaacaagctgcatccatctggaaaaaacacatctgattatcaaactgttacggtcgattattgataacgttgcgccaggtacagtgatcattaccgagaccaatgttccgcataaagacaacattgcttactttggcgcaggcgatgacgaagcacatatggtgtaccagttctcgctgccgccactggtgctgcatgcggtgcaaaaacagaacgttgaggcgctttgtgcgtgggcgcaaaacctgacactaccttccagcaacaccacctggtttaacttcctcgcctctcacgatggcatcgggctaaacccgctacggggcttgttgcctgaaagcgaaatattagagctggtcgaggcgttacagcaggaaggtgcattagtaaactggaaaaataatcccgacggtacacgcagtccgtatgaaataaatgtgacctatatggatgcgttaagccgccgtgagagtagcgatgaagaacgttgcgccaggtttatccttgcccatgcgattttgttaagtttccccggtgtgccagcgatatatattcaaagtattcttggctcgcgtaatgattacgcaggtgtcgaaaaactcggatataaccgtgcgattaaccgtaaaaaatatcacagtaaagagataacccgagaactgaacgatgaagctacattaaggcatgcggtatatcatgagttgtcgcgtttaattacacttcgtcgcagccataacgagtttcatccggataataattttaccattgatacgattaattcatccgtaatgcgtattccaagaagtaacgctgatggtaattgtctgactggattgtttaatgtcagtaaaaatattcagcatgtaaatattactaatctgcatggtcgggatctgattagtgaagttgatatattgggtaatgaaataacgctgcgcccctggcaggttatgtggattaaataaaaaggaacatctcatgattaaatcaaaaatcgtgctgttatcagcactggtttcatgcgccctgatttcaggctgtaaagaagaaaataaaacgaatgtatccatcgaatttatgcattcttcggtggagcaggagcgccaggccgttatcagtaaattgattgcccgttttgaaaaagaaaaccctggcatcaccgttaagcaagtgcccgtggaagaagatgcctataacactaaagtcattactctttcacgtagcggttcgctgccggaagtgatcgaaaccagccatgactacgccaaagtgatggacaaagagcagcttatcgatcgcaaagcggttgccacagtcatcagcaacgttggtgaaggcgcgttttacgatggcgtactgcgtattgtgcgtaccgaagatggtagcgcatggaccggtgttcctgtcagcgcctggattggcggtatctggtatcgcaaagatgtgctggcaaaagcggggcttgaggagccgaaaaactggcaacagctgctggacgttgcacagaaactgaatgacccggcgaataaaaaatacggcattgcgctgcctacagcagaaagcgtgttgacggaacaatccttctcccagtttgcgttatccaaccaggctaacgtctttaacgccgaaggcaaaatcacccttgatacaccagagatgatgcaggcactgacctattaccgcgaccttactgccaacactatgccgggttctaacgacatcatggaagtgaaagacgcctttatgaacggcaccgcgccgatggcgatttactccacctatatccttccggctgtgattaaagaaggcgacccgaaaaacgtcggtttcgtggtgccaaccgagaaaaactctgcggtctacggcatgttgacctcgctgaccattaccgccgggcaaaagaccgaagagacggaagcagcagaaaaatttgtcacctttatggagcaggcagacaacattgccgactgggtgatgatgtcgccaggtgctgcgctgccggtgaataaagcggtggtgactaccgccacctggaaagacaacgacgttattaaggcgctgggtgaactaccgaatcagctaatcggtgaactgccaaatattcaggtttttggcgcagtaggggataaaaactttacccgcatgggtgatgtgacgggttctggcgtggtgagttcaatggtgcataacgtcaccgtgggtaaagccgatctctctactacgctgcaagcgagccagaaaaaactggatgaactgatcgaacagcactaaacccaggacaggaatccgcaatgaacaggcttttttcaggtcgttccgatatgccctttgcgctgctgcttctcgcgcccagcttattactgctgggcggtctggtggcgtggccgatggtgtcgaatatcgaaatcagttttttacgtctgccgctcaatcccaacatcgagtcaacgtttgttggggtgagcaactatgtgcgtatcctctccgatcccggcttctggcattcgctgtggatgacggtctggtataccgcgctggtggtggcgggcagcaccgtgctcgggctggcggtggcgatgtttttcaaccgcgagttccgcctgcgcaaaaccgcgcgttcgctggtgatcctctcctacgtaacgccgtccatttcgctggtgttcgcctggaaatacatgttcaacaacggctacggcattgttaactacctcggcgtcgatcttctgcatctctatgagcaggcaccgctgtggttcgataatccgggcagtagctttgtgctggtggtgctgttcgccatctggcgctacttcccgtatgcctttatctcgtttctggcgattttgcagaccatcgacaaatcgctgtacgaagcggcagagatggatggcgctaatgcctggcaacggtttcgtatcgtcacgctgcccgcaattatgccggtcctggcgacggtggtgacactgcgcaccatctggatgttctacatgttcgcggatgtttatttgctgacgaccaaggtcgatattctcggtgtatatctctacaaaaccgcctttgcctttaatgatttaggaaaagcggcggcgatctcggtggtgctcttcatcattattttcgctgtcattctgctgaccaggaaacgggtgaacctcaatggcaacaaataaacgcacactcagtcgcatcggtttttactgcgggctggcgctgtttctcatcatcacgctgtttccattttttgtgatgctgatgacctcgttcaagggcgcgaaagaggcgatctcactgcatcctacgctgctgccgcagcagtggacgctggagcattacgtcgacatttttaacccgatgattttcccgtttgtcgactacttccgtaacagtctggtggtgtctgtggtttcatccgtggtggcggtattcctcggcattcttggggcttacgcgctttcccgcctgcgctttaaaggtcggatgaccatcaacgccagcttttacacggtgtatatgttctctggcattttgctggtggtgccgcttttcaaaatcatcaccgcgcttggcatttacgacactgagatggcgctgatcatcaccatggtgacgcaaactctgcccaccgccgtgtttatgctgaaaagctacttcgacaccatccccgatgagatcgaagaagcggcgatgatggatggcctcaaccgtctgcaaattatcttccgcatcaccgtgccgttggcgatgtccgggctgatatccgtgttcgtctactgctttatggtggcgtggaacgactatctgtttgcgtcgattttcctctccagcgccagcaatttcaccttaccggtgggcctgaacgcgctgttcagtacgccagattacatctggggacggatgatggcggcctcactggtgaccgcattgccggtggtgattatgtatgcgctttcggaacgttttattaagagtggtttgaccgccggtggcgtgaagggctaaagcggccagtttctttacaaggagttttaaatgaaaaagttagtagccacagcaccgcgtgttgctgcgctggttgagtatgaagatcgggcgattttagctaatgaagtgaagatccgcgtgcgtttcggcgcaccgaaacacggaacggaagtggtcgacttccgcgccgccagcccgtttattgatgaagactttaacggcgaatggcagatgttcactccgcgtccggcagatgcgccgcgcggcattgagtttggcaaattccagcttggcaacatggtggttggcgacattatcgagtgcggcagcgacgttaccgactacgcggtgggcgacagcgtatgcggctacggcccgctctccgagacggtcatcattaacgcagtgaataactacaagctgcgcaaaatgccgcaaggcagctcctggaaaaacgccgtctgctacgacccggcgcagtttgccatgagcggcgtgcgcgatgccaacgtgcgcgtaggggattttgtggtggtggtagggcttggcgcaatcggtcaaattgccatccaactggctaaacgcgctggcgcttctgtggtgattggcgtcgatcctatcgcccatcgctgtgatattgcccgtcgccacggcgcggatttctgccttaaccccatcggcactgatgtaggtaaagagatcaaaacgctgaccggcaagcagggtgccgatgtgattatcgaaaccagcggctacgccgacgcgctgcaatcggcgctccgcggtctggcttatggcggcaccatctcctatgtcgcgtttgccaagccgtttgccgaaggttttaacctcggacgcgaagcgcatttcaataacgccaaaattgtcttctctcgcgcgtgcagcgaaccgaacccggattatccgcgctggagccgcaagcgtattgaagaaacctgttgggaactgctgatgaacggttatctcaattgcgaagatttaatcgacccggtggtgacctttgccaatagcccggaaagctatatgcagtatgtcgaccagcatccggaacagagcatcaaaatgggcgttacgttttaattcaaaggaatgaaaaaaatgaaaatcggcacacagaatcaggcgttctttccggaaaacattctggagaaatttcgttatatcaaagagatgggcttcgatggttttgagattgacggcaaactgctggttaacaacatcgaagaagtcaaagcggcgatcaaagaaaccggtttaccggtgaccaccgcctgcggtggctatgacggatggattggcgactttatcgaagagcgtcgtcttaatggcttaaagcagatcgagcgcattctcgaagcgctggcagaagtgggcggtaaaggcatcgtcgttccggctgcgtggggcatgtttaccttccgcttaccgccgatgacctcgccgcgtagcctggacggcgaccgcaaaatggtgagtgattccctgcgcgtactggaacaggtcgccgcgcgtaccggaaccgtggtgtatctcgaaccgttaaaccgctatcaggatcatatgatcaacaccctcgccgatgcccgccgttacatcgtcgaaaacgatcttaaacatgtacagattatcggcgatttctatcacatgaatatcgaagaagataacctggcgcaggcgctgcatgacaaccgcgacctgctcggtcatgtgcatattgcggataaccatcgctaccagccgggcagcggcaccctggatttccacgcgctgtttgaacagctgcgcgcggataactatcagggctatgtagtgtacgaagggcgtatccgggcggaagatcctgcccaggcgtaccgtgattcgttggcctggttgcgtacctgctaagaggtctttgtgaaaagtgcaatgacaagctctccgctgcgggtcgcgataataggcgcaggccaggtggcggataaggttcatgcttcgtactactgcacccgcaacgatctggaactggtggctgtctgtgacagccgcctttcccaggcgcaggcgctggcagaaaaatacgggaatgcatccgtgtgggacgatccgcaggccatgctgctggcggtgaaacctgatgtggttagcgtctgctcacctaaccgttttcattacgaacataccctgatggcactggaagcgggctgccatgtgatgtgcgaaaaaccgcccgccatgacgccagaacaggcgcgggaaatgtgcgataccgcgcgcaaactgggcaaggtgctggcctacgactttcaccatcgttttgcgctcgatacgcaacagctgcgtgaacaggtgaccaacggcgttttgggagagatttacgttaccaccgcccgcgccctgcgtcgctgcggcgttcccggctggggtgtctttaccaataaagaactgcagggtggtggcccgctgatcgacatcggcattcatatgctggatgctgcgatgtatgtgctgggctttccggcggtgaaaagcgtgaatgcgcatagctttcaaaagatcggcacgcaaaagagctgtggtcaatttggtgagtgggatccggcaacttacagcgtcgaagattcgctgtttggcaccattgaatttcataacggcggcattctgtggctggaaacgtcatttgcactcaacatccgcgaacagtcgattatgaacgtcagcttttgtggtgataaagctggtgcgacgctgtttccagcacatatctacaccgataacaacggtgaattaatgacgctgatgcaacgggaaatagcagacgacaaccgccatttgcgcagcatggaagcctttatcaatcacgtacagggcaagcccgtgatgatagccgacgccgagcaggggtacatcatccagcaactggtggcggcgttgtatcaatccgcagaaacagggacgcgtgtggaattatgaccaggccagtaacgttatcagaaccccatttcagccagcataccctgaacaagtatgcatcgctgatggcgcaggggaacggctatcttgggcttcgcgccagccatgaagaagattacacgcgccagacgcgagggatgtatctggcggggctgtatcatcgggcgggaaaaggtgaaatcaacgaactggtgaacctgcctgatgtcgtggggatggagattgccataaatggtgaggttttctcgttatcccacgaagcctggcagcgtgagcttgactttgccagtggcgaattacgccgcaatgttgtctggcgtaccagcaacggctcaggttacaccatcgccagccgtcgctttgtttcggcagaccaactgccgctcattgcgctggaaatcactattacgccactggacgccgacgcgtcagtgctgatttcaacaggcattgacgccacgcaaaccaatcacggtcgccaacatctcgacgaaacccaggtgcgggtgtttggtcagcatctgatgcaggggagctacaccacccaggatggacgcagtgatgtggccatcagctgttgctgtaaggtgagcggtgatgtgcagcaatgctataccgccaaagagcgccgtttactgcaacataccagtgcgcagcttcatgcaggcgagacaatgacgttgcaaaaactggtgtggatcgactggcgggatgacaggcaagctgctttagacgagtggggcagcgcgtcgcttcgccagcttgaaatgtgcgcgcagcagagttacgaccaacttcttgcagcatcaacagaaaactggcgtcaatggtggcagaaacgtcgtatcacggtaaatggcggcgaagcgcacgatcagcaagcgttagattatgcgctttatcatctgcgcatcatgacgcctgcccacgacgagcgcagcagcattgcggcaaaaggcttaaccggcgaaggctacaaaggccacgttttctgggatacagaagtatttttgttaccgtttcatctgtttagcgatccgacggttgcccgaagtttactgcgttatcgctggcacaacttgccaggcgcgcaggagaaagcgcgacgcaacggctggcagggcgcgctatttccgtgggaaagcgcgcgcagcggcgaagaagagacgccggaatttgccgccattaacattcgcaccgggctgcggcaaaaagtggcctcggcgcaggcggaacatcatctggtggccgatatcgcctgggcggttattcaatactggcagaccacgggggatgaaagtttcattgcgcatgaaggcatggcgctacttctggagacggcaaagttctggattagccgcgcggtgagagttaacgatcgtctggaaattcatgatgttattgggccagacgaatataccgaacatgtcaataataatgcatacaccagctatatggcccgctacaacgttcaacaggcgctgaatattgcccgccagttcggctgtagcgacgatgcgtttatccatcgcgccgaaatgttcctcaaagagctatggatgccagaaattcagcccgacggcgttttgccgcaggatgattcgtttatggctaagccggcgattaatctggcgaaatacaaagcggcggcggggaagcaaaccatactgctggattattcacgcgcagaagtgaacgagatgcagatcctcaaacaagctgatgtggtgatgctcaattacatgctgccggagcagttctcagcggcatcgtgtcttgccaatctgcaattttatgaaccgcgcactattcacgactcgtcattaagtaaagcaatccacggcattgttgccgcacgctgtggcctgctgacccaaagttatcagttctggcgcgaggggactgaaatcgatcttggtgctgatccgcatagttgtgatgatggtatccatgctgccgcaactggcgctatctggctgggggcgattcagggttttgccggggtgagcgtgcgtgacggtgaattgcatctcaatccggcgttacctgagcagtggcaacagttgtctttccctctgttctggcagggctgcgaattacaggtcactcttgacgcgcagcgtattgcgattcgaacttctgcgcccgtttcactgcgtttgaacggtcagcttataaccgtggctgaagaatctgttttctgtttgggtgattttattttgcccttcaatgggaccgctaccaaacatcaggaggatgaatgaaactgcaaggggtaattttcgatctggatggtgtaatcaccgataccgcgcatctgcatttccaggcgtggcagcagattgccgctgaaattggcatcagcattgatgcgcagtttaacgaatccctaaaagggatcagccgcgatgagtctctgcggcgcattctgcaacacgggggcaaagagggcgactttaactcgcaggagagggcgcaactggcgtatcgcaaaaatctgctctatgtccactcactacgcgagttgacggtcaacgctgttctacccggcattcgctctttgctggcagatctccgtgcacagcagatctcggttgggctggcttctgtctccctgaatgcgccgacgattttagcggcgctggagctgcgcgagtttttcaccttctgcgcggatgcttcccaacttaaaaactcgaaaccggacccggaaatctttctcgccgcctgtgcagggctgggcgtgccgccgcaggcatgtatcggcattgaagatgcgcaggcgggcattgacgccattaacgccagcggtatgcgctcggtggggatcggcgcgggcttaaccggggcgcaattactgttgccttcaacggaatcactcacctggccgcggttatcggccttctggcaaaacgtatagcaaaggaatcaacatggctcagctttcgttacaacatattcaaaaaatctacgataaccaggtgcatgtggtgaaggacttcaacctggaaattgccgataaagagttcatcgtgtttgtcggcccgtcgggctgcggtaagtcgaccaccctgcgcatgattgccgggcttgaggagatcagcggcggcgatctgttgatcgacggcaaacgaatgaatgacgttccagccaaagcacgcaatatagcgatggtgttccagaactacgcgttgtatccgcatatgacggtttacgacaacatggcgtttggtctgaagatgcaaaaaatcgccaaagaggtgattgatgagcgggtgaactgggcggcgcaaattctcggcctgcgtgagtacctgaaacgtaagccgggggcgctttccggcgggcaacgtcagcgagtggcgcttgggcgggcgattgtacgcgaagcgggcgtgtttttaatggatgaaccgctctctaaccttgatgccaagctgcgcgtgcaaatgcgcgcagagatcagcaagctgcatcagaaactgaacaccaccatgatctacgtgacccacgatcagaccgaagcgatgaccatggcgacgcggattgtgattatgaaagacgggattgttcagcaagtaggtgcgccgaaaaccgtttataaccaacccgcgaatatgtttgtttccggatttattggatcaccagcgatgaattttattcgcggcacgatcgatggcgataaattcgttacggaaacgcttaaattaaccattcccgaagagaaattagcggttctgaaaacacaggaaagtttgcataagcccatcgtgatgggaatacgaccggaagatattcatccggacgcgcaagaggaaaataacatttccgccaaaattagcgtggcagaattaaccggtgcggaatttatgctctacaccacggttgggggcacgagttagtggtccgtgctggtgcgttaaatgattatcatgcaggagaaaatatcactattcattttgatatgacgaaatgtcatttctttgatgcagaaacggaaatagcaattcgctaaatacagggggaaggcattcccccaggataatacaaggaacaataatgaaaaagttattaccctgtaccgcactggtgatgtgtgcgggaatggcctgcgcacaggccgaggaaaggaacgactggcactttaatatcggcgcgatgtacgaaatagaaaacgtcgagggttatggcgaagatatggatgggctggcggagccttcagtctattttaatgccgccaacgggccgtggagaattgctctggcctattatcaggaagggccggtagattatagcgcgggtaaacgtggaacgtggtttgatcgcccggagctggaggtgcattatcagttcctcgaaaacgatgatttcagtttcggcctgaccggcggtttccgtaattatggttatcactacgttgatgaaccgggtaaagacacggcgaatatgcagcgctggaaaatcgcgccagactgggatgtgaaactgactgacgatttacgtttcaacggttggttgtcgatgtataaatttgccaacgatctgaacactaccggttacgctgatacccgtgtcgaaacggaaacaggtctgcaatataccttcaacgaaacggttgccttgcgagtgaactattatctcgagcgcggcttcaatatggacgacagccgcaataacggtgagttttccacgcaagaaattcgcgcctatttgccgctgacgctcggcaaccactcggtgacgccgtatacgcgcattgggctggatcgctggagtaactgggactggcaggatgatattgaacgtgaaggccatgattttaaccgtgtaggtttattttacggttatgatttccagaacggactttccgtttcgctggaatacgcgtttgagtggcaggatcacgacgaaggcgacagtgataaattccattatgcaggtgtcggcgtaaattactcgttctgataatgggctaaattgccggatgcggcgcgagtactttatccgatctataaatgtaggccggataagatgcgctagcatcgcatctggcattcaggcaaggtagctggtatttatttcagcgtcatatgcgtggcaacggtaatattctgtggtgacggttttccagaaattaagcggaataataactcgcagctttgttgacctaactcctgcgtcggaacatcgatgccgcccggtgcaggcgttaaaataaatgacagcgtttcattgctataacccaccaccgctaactgctgcggaatagcaatatttttctctgctgccgcacgataaatgctcattaatttcaggctgtcagtggcaaacaccgcctcaggcaacggtgactggcttaataattgccgtgctgcttttaatgcagtttcatgggtataaccgccatcaacaatccattcatcacgcactgcaatattatgcgcagccaggctctgcttataaccattaacgcgatcaaccgaaacatggacatcaagcggagcatgcaggcaggcaatattttgatgcccactttcaattaatgcatcggtcaacgcaatgctgtcgccaaaattatcggtatcgacagaataaacatgggcatattgaccttcaactttgccaatcaccaccaccggaatatcatatttatcgagttgggcaaaaaatgactcatccgctggcgaactgagcataataatgcctttaatcattttctgcttaattttgctttcgcatttttgcagatcttctgccggattgtgcgacgtttgtaatatcacgtcgaaaccttcttcttcagctttggcggtgatggcatgcaaaacttcagagaaaaacggattacccgccgtagttttggtcgaacgggtagaaatcaccataatggcatcaaaacccgaagaggtcagcgcgcgggccagcttgtttggctgatactgtaattcttcaatggcccgtaacactttttcgcgcgcttccggggagatattagtttgcttattcagcacgcgtgatacggtggattttgatacgcctgcaaccctggcaatatcataaatagtaggggacataggtcaggaactccgtccgaacgtgaatgctgcacatcttatggagttcgccggtcgatgacaacacgggcagttgataatcaatggcctggcccccacattcatatccttacgaatgattttttttctggtcttcagagcagcacaggacagcaatgaagcgacttaaaaatgaactcaatgcgctggtgaatcggggtgtcgacagacatctgcgcctcgctgtaaccggacttagccgcagcggcaaaacagcgtttatcaccgcgatggttaatcagttgcttaatattcacgccggagcacgtttgccgctgttaagtgcggtgcgtgaagagcgcctgctgggcgtgaaacgcattccccagcgtgactttggcattccgcgcttcacctatgacgaagggctggcgcagttatatggcgatccacccgcctggccaacgccaacgcgcggcgtcagtgaaatccgcctggcgctacgttttaaatcgaatgattcgctgctacgccactttaaggatacctccacgctgtatctggaaattgtggattatcccggcgaatggttgctcgacctgccgatgctggcgcaggactatttaagctggtcgcgccagatgacgggcttactcaatggtcagcgcggagaatggtcggcgaaatggcgaatgatgagcgaagggctggacccgctagcgcctgccgacgaaaaccggctggcggacattgccgccgcgtggaccgattatctccaccactgtaaagagcaggggctgcactttattcagcctgggcgctttgtcttgccgggagatatggcaggtgcgcccgcgctgcaattcttcccgtggccggatgtcgatacctggggcgagtccaaactggcgcaggccgataagcataccaatgccggaatgctgcgcgagcgctttaattattactgcgagaaggtggtgaaggggttctataagaatcattttctgcgctttgaccgccagattgtgctggtggattgcctgcaacctctcaacagtgggccacaggcatttaatgatatgcgtctggcactgacgcagctgatgcaaagttttcactacgggcagcgtaccctgttccggcgtttgttttcgccggttatcgataagctattgtttgctgccactaaagcggaccatgtgaccatcgatcagcacgctaatatggtttcattactgcaacaactgattcaggatgcctggcaaaatgcggcgttcgaagggatcagcatggactgcctggggctggcgtcagttcaggcgaccaccagcggcattattgatgttaacggtgagaaaatcccggcgctgcgtggtaatcgacttagcgatggcgcaccgctcactgtttatcctggcgaagttcccgcacgtttgcctggtcaggcgttctgggataagcaaggcttccagtttgaggcatttcgtccgcaggtgatggatgtcgacaaaccactaccgcatattcgtcttgatgctgcgctggaatttttaataggagataaattgcgatgaccgaaccgttaaaaccacgtattgatttcgacggtcctctggaggtcgatcagaatcctaaattcagggcgcagcagacctttgacgaaaatcaggcgcaaaattttgccccggccacgctcgacgaagcgcaggaagaagaggggcaagtcgaagcggtaatggacgcagcgttacgtccgaaacgcagcctgtggcgcaaaatggtgatgggagggctggctctgtttggcgcaagcgttgtcgggcagggtgtacagtggacaatgaatgcctggcaaacccaggactgggtggcgctgggtggatgtgccgctggggcattgattatcggcgctggcgtaggttctgtggtaacagagtggcggcgcttatggcgcttgcgacagcgcgcccatgaacgcgacgaagcgcgtgatttattgcatagccacggcacgggcaaaggccgcgcattttgcgaaaaactggcgcagcaggcgggtattgatcagtcgcatccggcgctgcaacgctggtatgcctcaatccatgaaacgcaaaacgaccgtgaagtggtcagcctgtatgcgcatttggtccagccagttttagatgcccaggcgcggcgcgaaatcagccgttcggcggcggaatcaacgttgatgattgcggtcagcccgctggcgttggtcgatatggcgtttatcgcctggcgcaatctgcgtttaattaatcgcatcgccacgctgtatggcattgaactggggtattacagccgtttgcgtctgtttaagctggtattgctgaatatcgcttttgccggagccagcgaactggtgcgcgaagtggggatggactggatgtcgcaagatctcgctgctcgtttgtctacccgcgcagctcaggggattggtgcaggacttctgacggcacgactcgggattaaagctatggagctttgccgcccgctgccgtggattgacgatgacaaacctcgcctcggggatttccgtcgtcagcttatcggtcaggtgaaagaaacgctgcaaaaaggcaaaacgcccagcgaaaaataatgcaatatcgggtgctgaccggatatctttacgccgaagtgcccgtttttccgtctttgtgtcaatgattgttgacagaaaccttcctgctatccaaatagtgtcatatcatcatattaattgttcttttttcaggtgaaggttcccatgcgtctggaagtcttttgtgaagaccgactcggtctgacccgcgaattactcgatctactcgtgctaagaggcattgatttacgcggtattgagattgatcccattgggcgaatctacctcaattttgctgaactggagtttgagagtttcagcagtctgatggccgaaatacgccgtattgcgggtgttaccgatgtgcgtactgtcccgtggatgccttccgaacgtgagcatctggcgttgagcgcgttactggaggcgttgcctgaacctgtgctctctgtcgatatgaaaagcaaagtggatatggcgaacccggcgagctgtcagctttttgggcaaaaattggatcgcctgcgcaaccataccgccgcacaattgattaacggctttaattttttacgttggctggaaagcgaaccgcaagattcgcataacgagcatgtcgttattaatgggcagaatttcctgatggagattacgcctgtttatcttcaggatgaaaatgatcaacacgtcctgaccggtgcggtggtgatgttgcgatcaacgattcgtatgggccgccagttgcaaaatgtcgccgcccaggacgtcagcgccttcagtcaaattgtcgccgtcagcccgaaaatgaagcatgttgtcgaacaggcgcagaaactggcgatgctaagcgcgccgctgctgattacgggtgacacaggtacaggtaaagatctctttgcctacgcctgccatcaggcaagccccagagcgggcaaaccttacctggcgctgaactgtgcgtctataccggaagatgcggtcgagagtgaactgtttggtcatgctccggaagggaagaaaggattctttgagcaggcgaacggtggttcggtgctgttggatgaaataggggaaatgtcaccacggatgcaggcgaaattactgcgtttccttaatgatggcactttccgtcgggttggcgaagaccatgaggtgcatgtcgatgtgcgggtgatttgcgctacgcagaagaatctggtcgaactggtgcaaaaaggcatgttccgtgaagatctctattatcgtctgaacgtgttgacgctcaatctgccgccgctacgtgactgtccgcaggacatcatgccgttaactgagctgttcgtcgcccgctttgccgacgagcagggcgtgccgcgtccgaaactggccgctgacctgaatactgtacttacgcgttatgcgtggccgggaaatgtgcggcagttaaagaacgctatctatcgcgcactgacacaactggacggttatgagctgcgtccacaggatattttgttgccggattatgacgccgcaacggtagccgtgggcgaagatgcgatggaaggttcgctggacgaaatcaccagccgttttgaacgctcggtattaacccagctttatcgcaattatcccagcacgcgcaaactggcaaaacgtctcggcgtttcacataccgcgattgccaataagttgcgggaatatggtctgagtcagaagaagaacgaagagtaagcgcgaatatgcctgatggtgcaacaccatcaggcatattaaattatgctttcagtacagccagagctgcttcgtaatccggctcggtggtgatttcatccaccagctggctgaaaatcacattgtcattttcgtcaataaccacaacggcacgcgctgccagacctttcagtgggccatcagcaattgccacaccgtaagcttgcagaaattcagcgttacggaaagtggagagggtgataacgttgttcagaccttctgcgccgcagaaacgagactgggcgaacggcagatcggcagagatacacagcacaacggtgttgtcgatctcagttgccagttggttaaacttacgtactgatgcggcgcaaacaccggtatcaatactcgggaaaatgttcagcactttgcgtttacccgcaaactgaccgagggtgacgtcagacagatcttttgccacgagagtaaaagtctgcgctttgctacccgcctgcgggatggaattggcgactgtaaccgggttgccctggaaatgaacggtttgtgacatgattatctttcctgtttacatatagttaacgtcacacctagtttatgctaactgtcaataacacagcaaacgctatttgcgcttaatccgcagaccaccgcgacaacaaggagtaaagatgagaaccgttaaggtattcgaggaagcctggcccttacataccccgtttgtgattgcccggggaagtcgcagtgaagcgcgcgtggtggtggttgaactggaagaagagggtattaaaggcaccggcgaatgcacgccgtatccgcgttatggggaaagtgatgcctcggtaatggcgcaaattatgagcgtcgtgccgcaactagagaaagggctgacacgggaggagttgcaaaaaattctccctgccggcgcagcacgtaatgcgctggattgtgcattgtgggatctggccgcgcgaagacagcagcaatcgctggctgatttgatcggcataacgcttcccgagacagttatcactgcacagacggttgtcatcggtacgcctgatcagatggccaatagtgcatcaacactctggcaggcaggcgcgaaattactgaaagtgaagctggataaccatcttatcagtgagcggatggtggcaattcgcacagctgtgcccgatgcgacgctgatcgttgatgcaaatgaatcctggcgtgcagaagggttggcggcgcgttgccagctattggcggatttaggcgttgcgatgcttgaacaaccgcttcctgcgcaggacgatgcggcgctggagaattttattcatccgttgccgatttgtgctgatgaaagttgtcatactcgtagcaatttgaaggcgctgaaagggcgctatgagatggttaatattaagctcgataaaaccgggggtctgacggaagcgctggcgctggcgactgaagcgcgtgcacaaggtttcagtctgatgctgggctgcatgttgtgtacctctcgtgccattagcgccgctttaccgctggtgccgcaggtcagtttcgccgatcttgacggaccgacctggctggcggtagatgtggaaccggcgcttcagttcacgacgggcgaattgcatctttaggatgccagcgcagcaagtttgccatcgcaaagagatatttttcgctggcttcgtcggaggagatgggcggaaactctgcggtgatgcaatgcaagttcagatctgcacaccaactgccgaaagagccaggcgtttcataaccgacgctggttaccagaggcaattcaaacgcctgagccagccattcgcctaattcgctgtgtctgggatcttcaatacaggccagtggatcgtggaatgagaccacccaggcaggttgaatgcggtgtataagctggcacagcgcctgggtttcaggttcggagccaggtttgtcacctgtcagtaatacgacatcgcgttcttcagcggcgctgttccagcgataaacggtttcaccttccttccagttcgccgccggaaagtttctgtttaaatccacaccattagcattggcccgtaaccccaactggcagccgtcaggattcacacacagcaccacatgatgacggcgcaaagaaggtgtcaacgtccgcagagcacaggagagcgtgacgaccgaagagttttcatcaccgtgagtgccagccagaatcaaaccactttcgcggctggctgcaggggcaggaaaccagattaacggcgcgcccaataatgaacgtccgtaatgttctgttccgggcggaaatgcgccgcgttcggcgcgtgggcgggttacggtcatgatcgtctctggttcaggaagtattacaggcagtgttgtgcaaattttgcggattatcaaatccttttcttcaacgctatgtcatcgatcttgtatcacttttttgccggaagttgtttgcattttattagttggatagggtttgtggatttttgctggctgacgggcaaataaagtttgtttaatggtttgcttatctgccagttgattaatcacatggcgggctatctgaccgccagcaccaagaatcagtacatttttcatgaaaattatcccagattattggcagcaatatgccagtccatatcactattgcggatttgaatatgtttcattacagagtttcctcaaagaacggagctaatactgaaattgcttcagccacataggctttgccgtcataaagatccatatggtttgcgccttcaacaatgtgatagcgtttatcctggcttgatgctcgatcgtacaggtcgtcactcatccatttgctccctgcctggctgcccgccacaatctgcgtcggctgagtcaggtacacttccgccatatggtaagcatcataggtaataatctggttaaggctgcgcaaagtagcgtaacccggtgctgttggatactgcgcgcgaggggtgtggtaatactcccaggcctgacgcagttcttcgttcggcgcatcggactccttcattggtgccagtggcataatggcgtattctccgctgctaatatcgctggttctggcgtttgaacccgcttcaacgtatggcagggcatcaatagatttcacattgttttcccaaccattacggaatatcgaaccaatattgaccgcactaacggtaccgatggccttgatgcggcgatcctgaattgcagcattggctgtatatcctgcaccggcacaaattcccatcgcaccaattcgggtattgtcgacataagaaagcgttgtcaggtaatcaatcacggcactgatgtcttcagtacgaatgtatgggttttctaactgacgcggctcgccgccactttcaccttgataagatgcgtcataagcaatagtgacaaatcccttttccgccagttttttggcataggttccggccgtttgttctttaacgcccccacctgggtgagataacacaattgcctgatactgacgggtttcatcaaattttggagggaaatagatcactgcagacaaagagatggttggattattgctgttagtgaagctgactttattattcatcattccgttcctcatggagttgtcggttcgttttaacggttggtgatatcactatagatattgatcattaagttgattagacccaaaatcatgattagacctatcatttaaatgattaatagattgcatggagatactgaatgaagcgtgaagaaatcgctgatctgatggcgtttgtcgtcgttgcagaggagcgtagcttcactcgtgcagcagcccgcctgagcatggcgcagtcagctttaagccagatagtgcgtcgtatagaagaacgattgggattgcggcttctgacgcgaaccacgcgcagcgttgttccaactgaagcgggcgagcatcttttgtctgttcttggccctatgttgcatgacatagattcagccatggcatccctgagcgatctgcagaaccgcccatccgggacaatacgtattactactgtagaacatgcagcaaaaacgatattgttaccagcaatgcgcacattcctgaaatcgcatcctgaaattgatattcagctcaccattgattatggtttgaccgatgtcgtttctgaacgttttgatgcaggcgtccgtctgggtggggagatggataaagatatgatcgccattcgaatcgggccagatataccaatggctattgttggctcaccggattatttttctcgccgaagtgttccaacgtcagtgtcacaattaatagatcatcaggcaattaatttgtatcttcccacatcgggtacagcaaatcgctggagattaatacgcggtggacgtgaagttcgtgttcgcatggaaggtcagcttttactgaatacgatagacctgatcattgatgctgcaattgatgggcatggattggcgtatctaccttatgatcaggttgagcgggctattaaagaaaaaaaactgatacgtgttttggataaattcacaccagatttacccggttatcacctgtactatccacaccgtcgacatgctggctcggcattctcattatttatagataggctgaagtataaaggtgctgtttagcactacttgctgatacattaatttaattcttctcttaacgtattctcagttcctttcaacgttttggtcattttttattcttcgtacaatggcgacagatgctgattatgataccgaaaacgggtttgaacgtgcgaagcccgaacgtagtgttcggagttctatgtgctttaccgcattttggagactattatttacactaaatctgatttgatatattgatacttaaaacatttgatgcttcctttgtcacttttttgatggaagttgtttgcatttctttaaggcgaaacaaataattacgcatcaattttaatgtcggttagagggaaacttatgaagcactctgtttcagtcacgtgttgtgcgctgttggtcagcagcatttctctttcgtatgctgcagaagttccgagcggcacagtactggcagagaagcaggagctggtgcgccacattaaagatgagcctgcgtcgctggatcccgctaaagccgtgggcctgccagagattcaggtcattcgcgatctgtttgaaggtctggtgaatcagaacgaaaaaggggagattgtccccggcgttgcgactcagtggaaaagtaatgacaaccgtatctggacttttaccctgcgcgataacgcaaaatgggcggatggcacaccggtaacggcgcaagattttgtctacagctggcaacgtctggtggacccaaaaacattgtcgccatttgcatggtttgccgcgctggcgggaatcaacaacgcacaggcgattattgatggtaaagctacgcctgaccagcttggcgtcaccgcagttgatgcccatactttgaaaattcagcttgataaaccgttgccgtggtttgtgaatttaaccgctaactttgccttcttcccggtgcaaaaagccaacgtagaaagcggtaaagagtggacgaaacccggaaatctgatcggcaatggcgcttatgttcttaaagagcgcgtagtcaatgaaaaactggtcgtggtaccgaatacccattattgggataacgccaaaacggtactgcaaaaagtgaccttcctgccaattaatcaggaatccgcagccactaagcgttacctcgcgggggatattgatatcaccgaatccttcccgaaaaatatgtatcagaagctgttgaaggatattccggggcaggtttatacgccgccgcagctcgggacctattattatgcgtttaacacgcaaaaagggccgacggcagatcagcgcgttcgtctggcattaagtatgacgatagatcgccgcctgatgaccgaaaaagtattagggacgggcgaaaagccagcgtggcattttacaccagatgttaccgcgggatttacgccggaaccttcgccgtttgaacaaatgagtcaggaagaactgaatgcgcaggcaaaaactttgttgagcgcagctggttatggtccgcaaaaaccgctgaagctgacgcttttgtataacacttcagaaaaccatcaaaaaattgcgattgctgtagcatcgatgtggaaaaagaaccttggcgtagatgttaaattgcaaaatcaggaatggaaaacctatatcgatagccgtaacaccggcaattttgatgttatccgcgcctcgtgggtgggggattataatgaaccctccactttcctgacattattaacgtcaacgcattcaggaaatatttcacgctttaacaatccggcatatgacaaagttctggcccaggcatcgacggaaaataccgttaaagcgcgtaatgccgattacaacgcggcagaaaaaatcctcatggagcaagcaccgattgcaccaatttatcaatataccaatggacgattaatcaagccgtggctgaaaggttatcccattaataatcctgaagatgtggcgtacagtcggactatgtatattgtgaagcattgatgtgatgggaactggcgttacccttgtgcataacgccagtgatgtctgatttagcgaccctgttccggcggtgtaatgttatccatatacagcgtctggctggggaaggcaaagtccgcgccgtgtgactgtacaatatcgataatcttcaaataaacgtcttgctgtgcagcaagccattcagcccataccgtggttttggtaaagcaataaaccataatattcaatgaagagtcagcaaactggttgaaataaaccagtaaggtttgtcgctggtcgatggccgggtgatttttcagcatctcacgtacagcttcgacaataacgcccacttttgccgcatcctcataacgtaaaccaatggtcgtggtaatgcggcggttggtcattcgtcctgggttttctacgctgatcgacgaaaacagcgagttcggtacgtacaatggacgattatcaaaggtcgtaattttggtaattcgccagccaatttccgctactgtaccttcgatatttctgtccggtgaacggatccagtcgccaatactgaaaggacggtcgaaatagagcataatcccggaaaagaagttactcagaatatctttaccggccataccgacagccagaccaccaataccaccaaaggtcagcaagccagaaaggctcatgccgaaatgttcgccataaagcagaacaagcaccacaataatggtgattttgatgatacgcgacataatccgcgcactggtgatatcgcgaccttttttaatctgctgtttttcaaactgattaatcagcagaaatagcttaatcgtcagaataaccgcaatcagggacgtacagataaaatcgataacgcctggggtgataaatttgagtttatagttttctataacataattaataatgctaccaacagcactgataattatggtgtagattaaaaattgcaccgcatggaataaaaatccttttcttttacgatttccacggcgaaaccaaaagctcatcagaatcaatgctgcgcagctaccgaaaataatgaccagattaagcgcattatttgtaaacagttcagcgatcattgttttatcaggctcctccagataattgtcgtcatgccggaaacccctggcggggctattttaccgcgacaattcattcagatcatcaatagtcagggaaggaagtagcaacattagctaaggaaggtgcgaacaagtccctgatatgagatcatgtttgtcatctggagccatagaacagggttcatcatgagtcatcaacttaccttcgccgacagtgaattcagcagtaagcgccgtcagaccagaaaagagattttcttgtcccgcatggagcagattctgccatggcaaaacatggtggaagtcatcgagccgttttaccccaaggctggtaatggccggcgaccttatccgctggaaaccatgctacgcattcactgcatgcagcattggtacaacctgagcgatggcgcgatggaagatgctctgtacgaaatcgcctccatgcgtctgtttgcccggttatccctggatagcgccttgccggaccgcaccaccatcatgaatttccgccacctgctggagcagcatcaactggcccgccaattgttcaagaccatcaatcgctggctggccgaagcaggcgtcatgatgactcaaggcaccttggtcgatgccaccatcattgaggcacccagctcgaccaagaacaaagagcagcaacgcgatccggagatgcatcagaccaagaaaggcaatcagtggcactttggcatgaaggcccacattggtgtcgatgccaagagtggcctgacccacagcctggtcaccaccgcggccaacgagcatgacctcaatcagctgggtaatctgctgcatggagaggagcaatttgtctcagccgatgccggctaccaaggggcgccacagcgcgaggagctggccgaggtggatgtggactggctgatcgccgagcgccccggcaaggtaagaaccttgaaacagcatccacgcaagaacaaaacggccatcaacatcgaatacatgaaagccagcatccgggccagggtggagcacccatttcgcatcatcaagcgacagttcggcttcgtgaaagccagatacaaggggttgctgaaaaacgataaccaactggcgatgttattcacgctggccaacctgtttcgggcggaccaaatgatacgtcagtgggagagatctcactaaaaactggggataacgccttaaatggcgaagaaacggtctaaataggctgattcaaggcatttacgggagaaaaaatcggctcaaacatgaagaaatgaaatgactgagtcagccgagaagaatttccccgcttattcgcaccttccctaactaatcaatgcgttgattgtaaatccagctaagaggtgaggttttcagagcagacaacggtgaaatgtcatggtattgttacgtttaggtaacaagaaatttgtctgcacaaggattacatcatgattatggcgaaactgaagtcagcgaaagggaagaaatttctctttggtttgttggcggttttcattattgcggcgtcggttgtgactcgcgcgaccatcggcggcgttatagaacagtacaatattccgctgtctgagtggacgacatcaatgtatgtgattcagtcatcgatgatttttgtttatagcctggtctttactgtgttgctggcaatcccgttgggaatttatttccttggcggcgaagagcagtaagtaaaaaataggcccgataactcgggccttgtcagttattgaagagtcgttaatcgtcttcttcgtcatccagttcaacgggtgtctgatactggtcaggtttaatgaccagcaggtcgcagcgaagatgatcaatcacctgttccgccgtgttgccgaggaatgctgctgaaataccggtgcgtcctaccgtgcccagaaccacaatccccgcctgtaagtgctccgccaaatcaggaatcacctcttctggcagacctttttctacgtgcgtcatgttttcattaatgccgaatttctgccgcagggctttcattgccagcaaatgttgcccacgaatggcatcgttataaacgctcgggtcaaattccggcagttcaatcgcgatattaattggcgttaccggataagcgccaaccagatgaacttcggtatggttgacttgttctgccagttcgatcgtctctttgaccagtttttcattgagcgcattatgatacggctcttcactggcgagattcaccgccaccagcgccttgcctccttccggccacggctggtctttcaccatccacaccgggcttgggcatttgcgtaacagatgccagtccgttggcgtaaaaatcaccgcttccagacggtcatgttggtgcgccatttttagcaccaaatcgtgtccgccgctgatcacttcctgaatgatggcttcgaaaggacggttatgccagaccactttaatttcaatgggaacgccagcattgagataatattttgcctgctcgtggatccaggctgtacgctggctgatgacgccctgacgcatagcggtacgttcgtccggggagagcagggtggtcatttcgtatgagaagtcatagatcggcaaaaaggctttaattttgccaccaatccgttgatgtaaataaacagctcgccgcaatgctggttggtcgtcctggttaggatcgataacaacgagcatgttctgatacatagccatacagggtctccttacaacaactgtcaacgcagtttgtaattaaaagattaacccatatctggtgaatgaaacagtgatgaaccttctgccagatcaataaatcagaaaaatttaatgatatgacagaaggatagtgagttatgcggaaaaatcaggcaacgttacgcgtatgaccagcaagctgggccagcgcatcgttattttcgatggtgatgtatttacctttgactgccagcatgccgcttttctggaagcgacccagcagacggctgatggtttctaccgtcaggcccagatagttaccgatatcgccacgagtcatcgtcaggcggaattcacgaggggagaagccgcgttgggcaaaacgacgggacaggttgtagatgaatgcagccagacgttcctcggcatttttcttcgacaacagcaggatcatgtcctgatcgcctttgatttcaccgctcatcagacgcatcatctgctgacgcagattcggcattttaccggacaaatcgtccagcgtttcgaacgggatttcacataccatcgaggtttccagcgcctgcgcgaagctcgggtgatggccgctgccgatggcgtcaaatcccaccaggtcgcctgctaaatggaaaccagtgatttgctcgtcgccttgctcagtgatggtataacttttaatcgtaccggagcggatggcataaagcgatttaagttcatcaccagccttaaacagcgtctggcctttctgaataggcttcttccgctcaatgatattatcaagctgatcaagctcatgttcgttgagtgtgaacgggatgcaaagctggctgatgctgcaatcctggcaatggatagcacaaccgccagactgaatgcgccgtataattcgcttttccgggatcataggtctgctcaagccgtaattgatatttgtcaattttaacatctttttagggagcaagtaagtctaagcaaaccttaacagcagagaattccgatattagatgtaaatatatgtctatctatttgaaaacccttaagttgttaagggtaactttacataaaagtgtgaacaagctggcacaaattgtttaatgtttacagcaaaagataaccttcatggcgcaataaccactcttttcgctgaactccgcctgcatatccggtcatggtgccgtttcggccaataacccgatggcaaggtacgacgatgctgatgggattcgatccgtttgccgcaccaacggcacgcgccgcgccaggacggcccaattgctcagccagttggccgtaatgcattacctgcccgcaggggatagtgcgtagtgttttccagacttcgcgctgaaatggcgtcccccccgtagcagtgggaagcgtatcaataatgctaagattaccggcaaaatattcacgaagcttgtcgcttaaaccgcctggattggtggcagaaatgcgctcatagccttctttgcgataatggatgtccagcagctgcaccatgcgttcgctgtactcttcccattcaaccgcccgcaggcgaaattgctcatcgcaaatcacccacagtggacccagtggcgtggcaattttttcttcaagtaatctcagcatccgttctctcttaagacaaacgtgggtaaatacccggacctatcggcagaccgacaagataccacgccagcaacatcagcagccataccaccaaaaagataagtggatagggcaagactaacgaatagtaagtacccagtttcgcgtctggtttgtagcgttgcaggaatccaagaaacagtggaacaaaaggagataccggcgctaaaggcaatacggatgagtcggcaatacgaaagaggatttgcgcaaatgccgggtgaaagccaagtagcataaacattggtacgaaaatgggggcgagaatcgaccagattgcggaaccgctggcaataaacatgcataagaaagaggaaagcaacgccagaccgacaaacgccgggatgccgctaagccctgaactttccagtatatcggtcagccccacggcgatgaatttccccatgttgctccagttaaacatggcgacaaattgggcgaggggaaaaaccatcacgataaatcccgccatctctttcatcggttcaatcattaaatgcggtaaatccgcctgacgtcgaattgtgcgggtagcgatgccataagccagcgagacaacaaagaaaaaaagaatgatcagtggcacgatacctttaataaagggtgatggcatcacggtgtgattaatcggatcgcgcaatatcccgttttgcgggatcaccatcagcgcaatcgcagcaataaaaagtagcgatacgacacctgctatgcgtaaaccaaaacgctgactttcggtcaatgtctgcagtttctcatcgctgtttccctgccattgacctaaccgtggctcgatgattttgtcggttatcaggccgccaacaatcgtcagtacgactacggagctggccataaaataccagttatcaattacactgacgtgcatttgcggattgaacgcagctgccgcttccgtgctgatccccgacagcaacacgtcggttgtgacaatcagtaaattagccgtaaagccgcaacctacgcctgcaatggcagccagtaaacctgcaactggatgcctgcccaccgccagaaaaatcagcgcacccatcggtggcatgatcactaacgccgcatcggaagaaatgtggctgaaaaaagcaataaacagcaccatataactggcgtagcgggcattaacatgcgatgccattttaaccattagtgctggcagtaagccgacgcgctccgccagaccggcacctaaaaccagcgccaggatcgcaccaagtggagcaaaaccgctaaagtttttaataacattgggtaaaaaccagtgtaatccttccacactgagcaggtttttcaccacgaccggcgtaccatcggtcgggtttttcgcactgacgccaaaggccgacaaaattgccgtcgtcaccatgagtacgataatcaaatagataaagagcagaaaaggatggggaaccttgttaccaattctttcgacccagccatagagcttcccggattgggaggacgacggtatggatgacatactcatgggcattcctcggttgttgtgtttgcgttgttgttgttattttaaaggtgacggtgtcacgtttttcgggatagggcagtgatacggttgcgtgtccgttacttgctgatgctcttgttggcattcttgcaatagccctgaatcaaggaagagattgactgtggttgctgccatagttttcgccgccagcagcattcctttatgagcaatagatgttcgcccctggctaaccagttgccacgtatgtagcggtgtaccgacggcaaaacaggggctgaaacactgggcaacaggcagtttccaactgacgtcgccgacatcagtcgatgccgcaagcacgttatcggtggcggcatatggagcgacttcattcgccagtaccgtttcacgatgacgtagtgcaaaaaccttgccgttttcgccaccggttgcggcgatattattcagactgttttgccgatcgttggaggtgagcgtagcctgaatttgtttcgcaaaagccagttcttcggagttccattccggggtaccaaaatgggatagggcctggtacatggcattttctaaggtgcgattcgggagataactggaacaggctttgtcgaagcggcattcaaccgtggtttcggtcatcaatgccgcaccttcggcgattttggcgacccgatcataaatatgctgcacgtcggtcatttcgggggcgcggataagataaagcacttctgcctgcgcctggaccacgttgggcgagatcccgccgctatttgtgatggcatagtgtacgcgcgctttttcaataatatgttcgttgaggaagttggtgccagtggtcatcaacgttacggcatcaagggcgctgcgtcccaaatgaggggaattcgcggcatgtgctgcgatccctttaaagcgccatgatgcctgaatgtttgccagcgtgcgggtattgaacataccggcaaaggcttccgggtgccaggtgagtgccgcatccacatcatcaaataccccctcgcgaaccatgaacgttttacccgagccgccttcttcgccaggacaaccataaaagcgcaccgtgccgccttgcccatattgttccagccatttcttgacggctattgcagcggcaaaggcggcggttcccagcaaattgtgtccgcaaccgtgaccattttcaccgggcgtcacggatgtaggttgcgcgcaacctgcttgctgacttaaacctgccagggcgtcatattctcccagcagggcgataaccggtttgccttgaccaaacgaagcaataaaggcatttgggatattgcctacgttgcgggtaacggtgaagcctgcagattccagcgccgaagccagatgctccgctgaccagaactcttcaaaacgtgtttctggatgatcccagatttgatcggcaatatcggtataacgttggcgatcggcttcaatcgcatcgtcgataaaacgatagatttcctgcatcagatacctcgcgtccagggaaaattgagcgcggtgcgcgccagcgtttcgacggcaatagcgagaacctgctcgtcaaaatcgaatttttcgttgtgatgacctgccgccagctgtgtgccaaacaccacgtaggaggcttgcccttgatgttgctgcacgcgggccatcattaatgtggcatcttcggaacccgcaggcgcttcaacacgttcaatggcctgattgacccccgcgacctgagccgcctgactttgcaaccatgcgacccattgcggcgaaggagaactggcggtagctgcacccatcagacgagtttcaacgccgacaccatacatggttgctgcgccctgaatcgcttgttgtgcacggtcaaaaacatattgattaatgacgtcgctggccccgcgtgtttccactttcagcaacgccgaggcaggaacaacgttacgaccgcttcctgcctgcataacgcccacgtttactctggaagctccttcgctgtgcggggcgattgcatgcagtgcaagagtggcttgtgctgccgccaacaaggcattgtgaccgtcttctggttttgcgcctgcgtgagcggcggtaccggtgaagtgcgcgtcaaatttggtggttgccataaaattatcactgccgcacaccacggtgcccgcaggtacgccagtgccaatgtgcacggcagtaaaataatcaacatcatctacgacacctgcatcgaccatcgcccgcgcgccacgcgtaccttcctctgcaggctgaaaaatcagtttgatgacgccatgtagtccggactcgaactgtttaagggtatgcgccagcccaagcccaatggcggtatgtccatcatgaccacaggcatgcatcattccggcgttacatgacgcaaaaccgtcgcggtaggggcgatggctgacatcctgctcttcactgagatccagcgcgtccatatcgacacggaaagccatcaccggaccggggcgaccggtatccagggtggcgacgataccagtgaaaccaccttcaaaagccgcaatccattgtgctagcgcaccctgttgacgagcgcgctcgaattcgcgttgtagagtgaattcatcaggtaatcccatccggctactttcattaactacttcgcgacccagcgccagtgaatagccgagctggtgcaattcttccgcaacaagggtggcagtgcggaattccacccagccagactctgcatagtgatgaaaatcacgtcgccagtgcgataattttggggcaagcgaattaacaaattgattcaaagactccataacctttcccgtcatcagtaaaaagtgtgacccggttcacgtagcgatagtttttacttatcactaactgatttttcacagttttaaccgttcataaattaccctgacacaatcatctgcattaaagtagatgccagtttctttggtctgataaataacggttatcggtggcgtcatggcttttcaggtaaaaattcatcaaattcgggcttttgttgaagtggctcgtcagggcagcattcgcggagcgagccgaatgttgaatatgtcgcaaccggcactgagtaaatctattcaggagctagaagaagggttagcggcgcaactcttttttcgccgtagtaaaggcgtgacgttaactgatgccggtgaaagtttttatcagcacgccagtctaattcttgaagagctgcgcgcagcccaagaggatattcgccaacgacaagggcaactggcagggcagattaatatcggcatgggggccagtatttcccgcagtctgatgccagctgtcatatctcgttttcatcagcagcatccgcaggtaaaagtacgcattatggaagggcaactggtgtcgatgattaatgaattgcgtcagggagaattggatttcaccatcaatacctattatcagggaccgtacgaccacgaatttacttttgagaaattactggaaaagcaattcgcgatcttttgccgcccgggacaccccgccattggtgcccgttcgatcaaacagttactggattacagctggacaatgccgacgccacacggcagctactacaaacagttgagtgaattgcttgacgatcaggcgcaaacgccacaggtcggtgtagtctgcgagacgttctcagcctgtatcagtctggtggcaaaaagcgattttctcagcaaactgcctgaagaaatgggctgcgatcccttgcacggacaggggctggtgatgttgccggttagcgaaattttaccgaaagcggcctattatttgattcagcggcgtgatagtcgccagacaccactgaccgcgtcattaatcacgcaattccggcgagaatgcggctatctgcaaagttaaaactgcataaaaaaatagagtctgtcgacatccgccagactctacagtacacacagcagtgcatccgcgtcttaaatccggcattgtctcctctgcgccggtgactgtgttataacggttttaacctttagttgccaattttcttcagtgacagatttcacgaaaatataagttacattattaatatcgtgaatgaataatcatgcataagtattttgcttaaaatatcggcaatatttggaacttattactggaaatttgggtaatacgttgttggaccgacccggtctggttatcatatcgcgctcttaattgcgggaggatgtaacatgaaccttgacgacaaatcgctgtttcttgacgccatggaagatgtccagccgctgaaacgtgctaccgatgtccactggcatccaacgcgtaaccaacgtgcgccgcagcgtatcgacacgctgcagcttgataatttcctcaccaccggatttctcgacatcatcccactaagtcagccgctggagtttcggcgggaagggttgcaacatggggtgctggataagctgcgcagtggtaaatatccgcaacaggcgagcctgaatcttttgcgccagccggtggaagagtgccgcaaaatggtgttcagttttattcaacaagccctggcggatggtttgcgtaacgtgctgattattcatggtaaagggcgggatgataaatcgcatgccaatattgtccgcagctatgtggcgcgctggctgaccgaatttgatgatgttcaggcatattgcaccgcgctaccgcatcatggcggcagcggggcgtgttacgtcgcactacgtaaaacggcgcaggcgaagcaagaaaactgggagcgccacgctaagcgcagtcgttgatctcgagacgcatccgcggcttatgccgccagcacgcggttgcgtccatcatttttcgcccgatacaaagcatcatcaacgcgtttaaacagttcatcgatgctttcatttccttcgtgatgcgccacaccaatgctgacggtaaagcgtggtaagcccgaaatactcacttttgccacgcttacgcggatagtttcagccagcgaaagcgcggtatccagtggggttcttggtagcaataagacaaactcttcgcctccccaacgaaacaccaaatcgcctttgcgagcgcaactttcgagggtgcgggcgagggcgcataacacctcatcacctttagaatgcccatagagatcgttaatgtgtttaaaacgatcggtgtcgatgagcaacaagctgtaatcctgagcgatggcgagatgctgcatttggcctggttccgtaatgtgataaaactgtcgccgattcagtaatccggtcatcgcgtcatggtgagcagcatgttccagctgctcctccagccgtttttgctcagtaatatcatgcacaatacataacatgagcttgtcgccataaatttcaatcggtccggcataggtctgcacatgacgagtcgaaccatccgccagtttatgaacaaaattcaaaggtttatgaccaccgggtaaatgcgagatttcatgcatgataggcatgacgcgacgcccgagcatatttatttcccaggtatgtttctggcacatcgtttcatggttataaccatagaaattgagcgcggcgaggttagcatcgacgatttgtccatctcgtgacgggtcaatcaacaacattggtgcagagttagtcagaaaaaagcgcgcataaaaaccttgttttttgcgctgataatttgccgagcgactggcttttaaacccagcgttgccggcgcttcgataccttcgaaaataatcaccggttctgtttctgtcagctttcgcaaaacaagccgacagctcaatgctgtttcctcttctttacgctgaacagtgaggatttcgataatatcgtgttggttttgcagatcggagaggtatttcggcagttctttttgtgaggagacggaatagggtccggttcgtagctgactaaacgtgaggtcttgcatcaacagtttcgccgcgctattggcataaattaactgttcctcaaagggcgaaacgatccagacaggactggtgagtaagtccagggtattgaagttgtgcgtaatcattgagatcccgttatttttatcaatttttgttgctatccgatcgcaaaaaagccacgtcatatgatcagataattctgataatgatagacgctatttaacacttcacacggtttgtatacggaaaagcattttgctttttgtattcaatttagacagaattttattaatcatttcagggtaatggggtgatgagatgttgcgtaacagggccagaaggctagactacaaaataatgcgttgatgatggaggcactgtggaagcgattaagggatcggacgttaatgtcccggatgcagtatttgcctggatgctggatggtagaggcggcgttaaaccgctggaaaatacagatgtgattgatgaagcgcatccctgttggctccaccttaattatgtacaccatgatagcgcccaatggctggcgacaacaccgctgcttcccaataacgtacgtgatgcgctggcgggcgagagcacgcgtccccgagtcagccgtctcggtgaaggcacgctgattacattgcgctgtataaacggcagcaccgatgaacgccccgatcaactggtcgccatgcgtgtatatatggacgggcggttaattgtttcgacccgacaacgcaaagtgctggcgctggacgatgtggtgagcgatctggaagagggcacgggtccgaccgattgcgggggatggctggtggatgtgtgcgatgcgttgaccgatcattccagtgaatttatcgagcagctgcacgataaaattatcgaccttgaagataatctccttgatcagcaaattccaccgcgtggattcctggctctgctgcgcaaacaattaattgtgatgcgtcgctatatggcaccgcaacgtgatgtttatgctcgtcttgccagtgaacgtttgccgtggatgagcgatgaccaacgccgtcggatgcaggatattgccgatcgccttgggcgcggccttgacgaaatcgacgcctgtatagcacggactggcgtgatggcggatgaaatcgctcaggtgatgcaggaaaatttagctcgtcgtacctatacaatgtcgttgatggcaatggtctttttacccagtacctttctgaccgggttatttggcgtcaaccttggtgggatccctggcggcgggtggcaattcggattttcaattttttgtattctgttagttgttcttattggtggtgttgctttatggttgcatcgtagtaaatggttgtaacaaaagcaatttttccggctgtctgtatacaaaaacgccgcaaagtttgagcgaagtcaataaactctctacccattcagggcaatatctctcttgcaggtgaatgcaacgtcaagcgatgggcgttgcgctccatattgtcttacttccttttttgaattactgcatagcacaattgattcgtacgacgccgactttgatgagtcggcttttttttgcctgttatttatcagcgtctaccctttaagagtccacccaatgaccagagggaaatatgacgacacttatttatttgcaaattcctgtccctgaaccgattcctggcgatcctgttccagtgcccgatccgatccctcgcccgcaacccatgcctgacccaccacccgatgaagaaccgattaaattgtcgcatcgtgagcgtagatctgcgaggatacgcgcctgctaactttgcgtcgatgaccacgagaatagattgtgaccgctttttctaccctgaatgttttgcctcccgcccaactcacgaaccttaatgagttgggttatttaaccatgacgccggtgcaggccgccgcgcttccggcgatccttgccggaaaagatgttcgcgtgcaggcgaaaaccggcagcggcaaaacggcggcttttggcctcggcttgttacagcaaattgatgcgtcgctatttcaaacccaggctttagtgctgtgtcctacgcgtgaactggcggatcaggtggcaggtgaattgcgtcggctggcgcgttttctgccaaataccaaaattttgacgttgtgcggtggtcaaccgttcggtatgcagcgtgattcgttgcaacatgcgccgcatattatcgtggcaacgccggggcgtttgctggatcacctgcaaaaaggcacggtatcactggatgcgttgaatacgctggtgatggatgaggccgaccgcatgctggatatgggatttagcgatgccattgatgatgtcatccgttttgcgcctgcatctcgacagacgcttctgttttcggcaacctggccggaagccatcgctgcaatcagcggacgagtgcaacgcgatcctttggcgattgaaattgactcaacagatgctttgccacccattgaacaacaattttatgagacatccagcaaaggcaaaattcctctgttgcaacggttattaagcttgcatcagccatcctcttgcgtggtgttttgcaataccaaaaaagattgccaggctgtctgcgacgcgctgaatgaagtagggcaaagtgcattgtcattacacggcgatttggagcaacgcgatcgcgatcagaccctggtacgttttgctaacggtagcgcccgtgtactggtcgcgactgatgttgctgcgcgtggtctggatattaaatcgcttgagctggtggtgaactttgagctggcgtgggaccctgaagttcatgtacatcgcatcggtcgtacagctcgtgcaggaaatagcggtctggcgatcagtttctgtgctccggaagaagcacagcgggccaatatcatttctgacatgttgcagataaaacttaactggcaaacgccgccagctaatagttccattgcgacgctggaagcagaaatggcaacgttgtgtatcgatggcgggaaaaaagccaaaatgcgcccgggtgatgtattaggtgcactgacaggagatatcgggcttgatggcgcagatattggcaaaatcgccgtgcatccggcgcatgtctatgtcgcggtccgtcaggctgttgctcataaagcatggaaacagttacagggcgggaagattaaaggaaaaacgtgccgggtgcggttattaaaataatgaaatgttgaattgccgggtgcaagagtaaacatcttattcgggattgccggatgcgacgctggccgcgtcttatccggcctccataagagtagcccgatacgcttgcgcatcgggcgctatcctggttatttcacttcaaccacattcagccgtaactcatccaactgattttcatcttcttctggctgccagcacgccggttgtagtgggatctcttcgcgatcaaacgccagatcacccccgttaaccacttcagaaccgtgggtgatgcctttgaaatcgaacaggttggtatcgcacagatgcgacggcaccacattctgcatcgcgctgaacatcgtctcgatacgccctggataacgtttatcccagtcacgcaacatgtcagcaatcacctgacgttgcaggttaggctgtgaaccgcacaggttgcacggaataatcgggaacgcttttgcatcggcaaatcgctgaatatctttctcgcggcagtaggccagcggacgaataacgatatgtttgccatcatcgctcatcagtttcggaggcatacctttcatcttaccgccgtagaacatatttaagaacaacgtttgcaggatatcgtcacgatggtgacccaacgcgatcttcgtcgcccccagttccgttgcggtacgataaaggataccgcgacgaaggcgagaacacagtgagcaagtggttttgccctctggaatcttctctttcacgataccgtaagtattctcttcaacaatcttgtactcaacgcccagcttttcaagatactcgggcagaacgtgttccgggaagcccggttgcttttgatcgaggttaacagccaccagcgaaaaattgattggcgcgctttgctgcaaattgcgcagaatctccagcatggtatagctgtctttacccccggagaggcaaaccatgatgcgatcgccttcttcaatcatattgaagtcagcaatggcttcgcccacgttacgacgcagacgtttttgtaatttgttcaggttgtattgttctttctttgtaatttgttgattttcttgcattatttcagttctctggtactaaatggggcaaattgggggcaaactttgcaactacgataaccgcgcattcaacatggctatctgttcgtcgttcatgtcatcaatccacataccgtaaatttcatacaccatctgcgcagtttcatgccccatttggctggctataaatgccgggttcgctcctgccgtcaacagccagcaggcaaaagtatgccgcgtatggtacggattacggcggcgaataccagcacgttttactgctgcattccaccttgcccccaaactgcttaccgagtaataaggtttttgttttccgttacacaccctgggcatgaaaacaaaatgcagtttttgcttttcggttctgccgtactcccgatgataaaaggtgatttcgcttttgcgatgatgcccggtcagtttgtattgctccttcagtgcttcaagagcaggctgcagtagtgttactgttcggatcccggcatttgtttttgggggaccgaacatatcaagtatcgtcaggtttcttctgacattcactattcccttttcgagatccacatcctcccacgccagagctgccagttccccgtgacgaagtcctgagtaaacggcaaatttccacaagttctggctctgtcctttttcactttccattaatgcattgaattctgttttagataacggatcaggctttattctgtttcgctgtaatttttttactccttcaaatggtttggttgatataaatcccgactgatacgcaaaacgcaacagcgaacagagcagggcgatatagttatcaactgtgcgcacggttcttccttttttgttggatcttggattatccaggtaaagcgtttctccatgcagcagttcattccggtagtttaagatatcgctataacgaatatgtgatatcggggtactttcacaaattattattctgagtgtttttaattgtgatttcgttttcttcattgtgtttgttgttaactctgtctctttaatttttgtccagatatcacaaagctctccgaacgtttttatgactctcgttgtcaccatttttgccccagtgctggactggggaaaacgtcttaaatactcaaattcaccggagtttatttcatgaactatcagcgctcttaaatttccggcctttttaatattactgtttgtaatctcccagccttttaatgtttcccgacatcgttttcctcgaaacatgaaccagatgcgaatgtatctacctctaatctcgacacctgttggtaatttagacatatcatgagtctttgataaactgatttatctttggatagttgtaccagataatccctcgtttgctgtctggcttacctaaaggagatactcgtttgaagtggaagccctccacccaacagttctggcggtatgcttcaatttgtctggcccccagaccagtgcgaagcatcaggccgtattcaaccatccactcttcattaaagattacttgtgccatcgcatcacctctggcaggcgccaatgttagactgaaattgacgcccgatgttgattattaataatcagctatgaagttttaatttgaatacaatgcaattctcgaggactgaagtttctcgcaattaaaatttatcagttttactttctgctctctggaaacgcctgcttcttttttacctgagagcattttttcgcattctgatttcgttagtttagattttgaatatcttgtccagttagtaggagtgccaccttccttttcaatagtggcggtaattttatacatgaacacctccattattatttccagtggttcgtttattccatctttcgagtgcttctttttcacttccaccataaccggttcgggattcgcatccgttacacttcgctcggtaatatcctgaaatggctttcaccgttactgatggacaaccacaaaatggacatggtttaacattgtcatatctcataatttttctcataaaaaatatttcaagttggcggtgcattacaccgccaggctgaattattcctctgaattatcgattacactgtattccccggttaatacagaggaatctgcaggatcgattgtcagtggttccttttcatccattgatactgcacgctggatctcaattgatacgggcaaatatttgaacaggcgacgaatagccgttttctttgccatttcttcccagtgagttacccacggcccgttattaccagctttactcaggctgcgcaccagctcaatctgtttgcgcgtcataacttcaaactgagtacctccgtctttcagtcttgcgacagcatagacgtgggtaaccggggcatcttcgttttctcccgggcggtgtattaacttttcatcaaggccaaattcgaagctaaactcgtcaccttcacggacaacacgggctgacaggctggcgatttgaccagaacggcgagccagatcaatcatgccgcgatagccaatgattagctgaacgttctttttaccgctcttttcgtttttattaccaaaaggcagtaaatatgcatgaccgagggcgctacctggctcaagtccgagctgtgaacactgtacgatcgcactgacaaaactcatagtgtcacagtttcctaacgccggaactttacgaatttctgtggtggcgatacggatcatacgttcagccgtcatatggcgtggaagagctgctgccagttgctctttcattgatggctggttaataaaactaatcacgtcgctatttttaactgctgctggtgcacggtttccctgagttttttgcagatcggcttttgcgattggtggttgcttagtcatttgcatattccttagcccagcggggcagtgataatgtcttaatagctggccattcatcggtattcaggcagtcagacagggttcgcagattgcggtgatattcctgttgacctgccagttttgcttcttcgcccatcatgaaaatttcaaccggataacgtccgcattcaatagttgtgctggcaaccagaaaaacgaaagttggctgcactccaaactgtgcttcataaccgtcactgtagaatgcatcctgaacgtgatagcggtagtcgtaataagcggttttgaatcgttgaatatccgccgtagttttcacgtccatgatccagtgaaattcagggataattttgtccggacggcaccgacacaaaattcctgtttcaggatcttcccagtaaattgatgattcagcgtgtccggcgctttcaacaagccattgccccagcggcaaagccataacgctttgatacatgagttcaattttccggccttcttccgcagtgataaccgtttttcctgtgcttgcgcattccatcagaaacgctttctcttcttcttttccggcgtttgtacggcggttaaattcaggtgctacgataaagcggttactgaattcttccggttcaagtacccggcagtggaaagcagttcctaaatcgagcgtttttgtctttgtggtgtccacgggggcatttttacgccacaaatatagtgccggagtatcagcaatgtcatcgagctgagacttactgataccgggacccgcgtggtaattctcattcgaaattccgtaataaatacctggctctatgtcttctacgattacgggatctgcgacttcgccagtttcatcactgcaatcgcgatgcggatcgctgccagcattctcattgtgcggatgttcagcgccttccatttcctccggatcattttccttagcttcaacctgactctcttcatcgaatgtttcctggtatgttgcgtcgcccatcaccgcaccacagtcagggcagttatccccgccagtctggccgcaggcattgcaggctatttccggttcctgttgcactactggctcaggttgattcatatctgggctggttttttccgtttctggctggttctggtacacacaatcgcgagtctggatcccctttacccatttcggatcgttcgggtcgctaattccgtcaacaaattcaccacgtgatgcagcaagcaatttatcgtcatcgacaggattttttgatggaatgtttttccgggcttcatggagttctgcccgcagttcctgatatttcgcatcaacagaatttacctgtgactgagcatccagcggctgcgtgtcctgatgatgttcagttgcgtccggttccattgtttcagcctctccctgttcaactgccgttgttccagatggttgcggtttttcttcatcatcctgttttccttcttctgttactcgctgcggcatcggggcagaggagcgaccgcaggcaatatccacgatttccggatcagggttggcatgatcggtttcagtcagtactttgttcagatattcagtgacgtgcgcggggatgacctcgatcccaattggtgcttcttttacggacgcaaccacgatggcgcgggaataatccagcccgccaggcatggtgatgaatttgtcgcggaaaacagaaaagggcggtttattttcagcgataatttcctcaatgcgtttagcgtgtgccggatgaaggttatagatgtccagatccattgaacgggccagtacgccagtggctacgtcgcgcgccagtgacgtcagatcgtgtacgaaaccttcgccgcgatcggtgaggtttccgccgccagcattagcaccggaagccgtgcgagtgatgtgtgaaacacgattacccttcatccactcttttgtcagcagtcctcgatcggtgtagtcagcgttcaggtatgcttcgaaaaaagcagttatcagtcccaggtttgaattaccaggattagggaaaactttgtcagtgtcacgaaccagtttgtggagttcgcgaatttccagcgggtcgagcaggctggttttgtgggaaacagccagggcagtaacagccggtagttcttcagcccgagcaatgtgtaatgcctggagtccgtcgcgtgaaacgtgcgttaccggtttttcgctgccgtgttgagcaagccaacgaatgggcagttcctggccagaaattgggagtagcatattctcctcaatctcagtcatgtcttcgccgttgacgttggtattgccttgatagtgagcgttgtctggtgctgctcccggttttagttcccatgtcatggagtctttgctgagttgatagcgttcactccaggtaaaatcgatctcaccttcagcgggcaggtcattaacgacaggaaaattcgtggcaacagctttaaaatagctgctcagttttttacctgacttaacgatcaggtagtccagagtggcacaggtcgattcaaaatcgttgcttgcccacaggacgacgtcaggttcaccggatgattttttcgctttccgtaacaggaagagtggttttgtgctcattgttttttaacctcaactcagattaaaattcgttttgttcagtgaatgatcttgccggatacacactgttcatagcctgcgccatacgcaggctatttctttcagatttcaccttttaatttcattgcaattagagttgccagaaattcggcttttttttctgcgggcagattctttccgatatgcaccaggcacatttttttgacaccttcatcaagtgtttttacgttgcctgatggaccatcgatatcaaccacagtgaatggggtttctttattttctgttttaattacgtagccaatgcgctttccttccagattcacctcgtgaacaatgtcatcggtagttacaacagtggcttcataattggtaatcatgtttttctccttaattaaggttgagcgaatacctgccatttctggcataaattcagtttcgaatagtcaattaattaaagttcatgtgccatctggtctttttcggcacaagcttcactgcaatattttctcggttcgtcttttgataaaatcccgtgcatgaagtgaagcattctttcaatagctttgctttcttcaacgtcttttttgcaaaggtggtaagcacattttattttcttagtcatcaccatgactccgcctttacaggtaaaccatcacgaccgaggaagactttaatcatgcggtcagtaatgaatgtttttgtggtcaggttacgaatatatagttttcgctttttaatattgtttgccgaggcaatatatgtccggccttcatgaagaacataatcgccaggagtcacacactgacgtggtatttcatcagttccgaagtgatgtgcaatcataattatctccatttttacaaatgaactttgttgatgcggtgtctggtgcctccaggtgactgcaaccagttaacaattacagtcggctttcccacccaaaccaataaggactaacatgacttttaactgtgccacgtgcgcttagccgcattcaccgcatcacaaaattcactttaaaaagggcggacatcagccgaacttcaagaaaaaaactgatgccgccaggactacacacagcaatgtcgttatttacaaccggaggcgcactcccaccatttaaatttaacagacaagaccgactctttatggatatcggaaatgcgccttcgtgttgtgcccggttttatttcaccacctccgggcttcggtggtctcggctatacccctacagcgagagcttgtgttaacatttcaatacccttacagttgagagttattgatatgttggatgtatttactccattgttgaaactttttgctaacgagccactcgaaagacttatgtatacgattatcatttttggtctcactctctggctgataccgaaagagtttactgtcgcattcaatgcttatactgaaataccttggctctttcagattatcgtttttgccttttctttcgtggtcgccatttccttctcaagattgcgagcacatattcaaaagcattattcattactaccagagcaacgagtattgcttcgtttatctgagaaagaaatcgctgtatttaaagatttccttaaaacaggaaatcttattatcacttctccttgccgtaacccggttatgaaaaaattagaacggaagggcatcattcaacatcagagtgatagcgcaaactgttcttattatctcgtcaccgaaaaatactcccattttatgaagttattctggaacagcaggagtagacgttttaatcgttagcttactgtgtgcttctccaaccatcggcgcgcaccagtttcggttttaaatgttttgcttttggtatacgtcatggcagtgaacgttccatcctggttggggaacacgccgcacaccagggattcgttgttgccgaggtcgattttttgcattttgcgaatctcacatcttgttgctacgtatagcgacttctgcctgccagagatcccagtcgttgctgcgtaaagcctgcacagcctggttgtaagtgataccgcaacaatccatcaaatactgaactacttcgtaatgcaccatcttatctctccccttaacgccgggtggcggaactaactgctgcactgcaaaatttgaatcccgccgtcatgttcatacgcctcgggctggctacttaaccccttaccactgcctggtaactcgaagtattgcccggcgttctgtggggcggggtgggtggtatgctggaactataggtaatgcctaattgattgtcaataggctatgcctaatgttttgagcgtaacctaataggtgatggcgacagcagaaagtgatgggggggttaaataacggaatccaggagttttccgtcagaccatataagtttaagttccagtttttgtgatgttctggcttttccgttcagattcaagagctttcagatacttacccactttcatttccatcgctgctatgtaggcgcgaacatcgtggtcaacccaatctggttctgtagcatttccagataacaggaaagctacaatcgctcttatttcatcagaggctgcttgataaaggttgtttatatctaaaagttcactttttgtatctgaattggtgggggttggtatggggtattcgttaagcccccaatgctctggaccaacaacatcagaaaagaaacgccataattctggaagtttatctttacttatagagcctttcttaatccagtcataaattgatggtggttggactttaaagtggcgtgcgacctccgcctttgatttgacggatcccgatgcgatttttttgttaatggcctgctctatcgctcggcctaagtctttaccactaagcattgcttaatattctcctatgcgcattacattaggcaatccctacccttactgcattaggcacagcctattgacaattgcgttaggcgtcgcctaatatttctgtgtgtttttggagttcattcgatgaaaaaagagaactattcattcaagcaagcttgtgctgttgtcggtgggcaatcagcaatggctaggcttttaggtgtatcacctccaagcgtaaatcaatggatcaaaggggtacgtcaattgcctgccgagagatgtccagcaattgaacgtgcaacaagaggtgaggttctgtgcgaagaacttcgtcctgatattgactggtcatatttacgacgttcggcatgttgttcgcagaatatgtcagtgaagcaactaaatgacagtaacaaatcctcatttgatcatacctgaaacatcaagaggcaaatgattcatgaaaatcaagcatgagcacatcgaatcagtgttgtttgccctagcagccgaaaaagggcaggcatgggtagccaatgcaattactgaagaatatctgcgccaggggggcggcgaattgcccctggttccaggcaaggactggaacaatcagcagaatatctatcaccgttggttgaaaggtgaaacgaaaacgcaaagagaaaaaattcagaagctgatcccagcaattctggcaatccttccgcgcgagctgcgtcaccgactctgcatcttcgataccctggaacgccgtgcattactggcggcgcaggaagcgttaagtacggcaattgatgcgcatgatgatgcagtccaagccgtttaccggaaagcgcatttcagcggcggcggttcttccgacgattctgtcattgttcattaagcaaaagtttccatgctgtttgtgcttattctaagccaccgggcagcatcatacggggcaattatggccgcattaccatacatgcaactgtacatagctgattacctggctgacaccatgcatttgtcagcagaggagcatggtgcgtatttgttgctgatgttcaattactggcaaacaggaaagccaatacctaaaaacaggctggcaaaaattgcccgtctgactaacgagcgatgggctgatgttgaaccatccttgcaggagtttttttgcgataacggcgaggaatgggtgcatcttcggattgaggaagatctggcatcagtcagggaaaaattaaccaaaaaatcagccgcaggaaaagcatctgttcaggccagaagaagcagaaaggaagcagatgttcaaacaaaacaagagagaaatttaacaggtgttcaaacagatgttgaagtggtgtttgaacatgatgtcaacacaaaggcaactaataaagatacagataaagatctaaaaacagatccccccctaaatcccccccgggggaatcgaggtgtcaaaaagtttgaccctctggatattactttgccgaactggatttctgtctcgctttggcgtgagtgggttgaatttcgccaggcattgcgaaaaccgattcgaacggagcagggcgctaacggggcgatacgggagctggaaaaattccgccagcagggtttttcacctgagcaggtgattcgacacagcatcgccaatgaataccagggcttgttcgcgccgaaaggtgttcgacctgagacgttactccgacaggttaacaccgtctcgttaccggatagtgcgatcccgccaggcttcagggggtaactgaccatgaaaaatattgcgacaggcgatgttcttgaacgtatccgcagactggccccgtcacatgtaaccgcgccattcaagacggtagcggagtggcgcgagtggcaactttccgaaggccagaaacgttgtgaggagatcaaccgtcagaatcgtcagttgcgggtggaaaaaattctgaatcgctctggcatccagccattgcaccgcaaatgctcgttttcgaattaccaggtgcagaacgaagggcagcgatacgcgttgagtcaggcgaaatccatcgctgatgaactgatgaccgggtgtacaaattttgcgttcagcggaaaacctggtaccgggaagaaccacttagcggcagctatcgggaatcgcctgctgaaagacggtcagacagtgattgtggttaccgtggctgatgttatgagtgccctgcacgccagctatgacgatgggcagtcaggcgaaaaatttttgcgggaactgtgcgaagtggatctgctggttcttgatgaaattggcattcagcgcgagacgaaaaacgagcaggtggtactgcaccagattgttgatcgccggacagcgtcgatgcgcagcgtggggatgctgacaaacctgaactatgaggccatgaaaacattgctcggcgagcggattatggatcgcatgaccatgaacggcgggcgatgggtgaattttaactgggagagctggcgtccgaatgtcgtccagccaggaattgcgaagtaatttttaccgggagaaaaatttaatggagactgtttttgacgcactgaaagcaatgggaaaagccacatccatagaacttgctgcgcgacttgatatcagtcgtgaagaagtgctgaacgaactatgggaactgaaaaaggctggttttgttgataaaagcgcgtacacctggcgtgtggctgataacaatgttcagcaggaacagccagcgcaggcagaactgccggaagaaatcaccacagcaacagtagcgaaaatctcagagtgcgatttaaccgcgacgattgaacaacgaggaccacaaacggctgatgagctggctacattgtttggtaccacatcacgcaaagtggcttcaacgctggcaatggcaatcagcaaaggtcgtctgattcgcgtaaatcagggcggtaaatttcgttactgcataccgggcgataatttaccagcagagccgaaagcagcatcggtatctccgctctggttatctgcatcgtcgtctgcctgtcatggggtgttaatcattaccgtgataacgccatcgcctacaaagaacagcgcgacaaaaatgccagagaactgaagctggcgaacgcggcaattactgagatgcagatgcgtcagcgtgatgttgctgcgctcgatgcaaaatacacgaaggagttagctgatgcgaaagctgaaaatgatgctctgcgtgatgatgttgccgctggtcgtcgtcggttgcacatcaaagcagtctgtcagtcagtgcgtgaagccaccaccgcctccggcgtggataatgcagcctccccccgactggcagacaccgctgaacgggattatttcaccctccgggaacgactggtaatgatgcaggcccaacttgaaggtgctcagcaatacataaccgagcagtgtttaaagtaaaatcttaactacaatatgattcattttgatgattgtttcataaggaacagtgaagtaagatctaagaggagttaaattttatacagtataatcataatattgcagcaaggtggttataattgaaagaatatttagatatgaatacatctcatgtaagagttgttactcatatgtgtgggttcctggtttggctctatagtctttcaatgttgccaccaatggttgtagcattgttttataaagaaaaaagcctgtttgttttctttataactttcgttatatttttttgcattggtggcggagcgtggtatacaactaagaaatctggcattcaattacgtacccgtgatgggtttattataattgtaatgttttggattttgttttctgttattagtgcattccctttatggattgactcagaacttaatttaacgttcattgatgctctgtttgaaggggtttctggaataacaacaacaggagcaactgtaattgatgatgttagttcattacctcgggcatatttgtactatcggtcacagttaaattttataggtggtttaggagttattgttctggcggttgctgtattgccattattgggtattggtggtgcaaagctttatcagtcagaaatgccggggccatttaaggatgacaaactcactccccgcctggccgatacgtcacggacactgtggataacttattctttattaggtattgcttgtattgtctgttatagacttgcaggaatgcctttgtttgatgctatttgtcacgggatttccacagtttcgcttggtggtttctcaactcatagcgagagtatcggatattttaataactatttggttgagctggtggctggttctttttccctgctatcggctttcaacttcactctttggtatattgttattagcaggaaaacgataaaacctttaatcagagatattgaacttcgtttctttctgttaatagccttaggggtgatcattgttacctctttccaggtctggcatataggtatgtatgacttgcatggaagttttattcattcgttttttcttgccagctccatgctcactgataatggtttagctacgcaggattatgcaagttggcccacgcacacgatagtgtttttgctgttgtcaagtttctttgggggatgtataggttcaacttgtggtggaattaagtcacttcgatttcttatacttttcaaacaaagcaaacacgagataaatcagctttctcatcccagagcgttgttgagtgtaaatgtaggagggaagatagttacagatcgtgtaatgaggtctgtatggagtttcttttttctttatactctcttcacggtgttttttatactggtgttaaatggtatgggatatgattttcttacatcatttgcaacagtggctgcatgtattaataatatgggattaggttttggggctactgcatcgtcattcggagtgcttaatgacattgcaaaatgcttaatgtgcatagctatgattcttggtcgccttgaaatttatcctgttattatattgttttcaggttttttttggcgctcctaatatatggctgatttataattgtgagtttaatattatgttgactcactcattgatccaatacctaactttaccagcaacacctccgtccccagtagcactggctgctggggtgcgttttattcataaagcaaggctgtatgagcgagaaattaaagatagtctatcgcccattacaagaattgtcaccgtatgcgcacaacgccaggacgcacagtactgagcaggtggcacaactggtagaaagtattaagcaattcggctggactaatccggtgctgattgacgaaaagggcgaaattattgcgggtcacggtcgtgttatggcggctgaaatgctcaaaatggattctgttccggtcattgttctgtctggcctgacggatgagcagaagcagcgataacgatcagtatcgctcccgtaatgcattaatccgtcgccacattgagaaaatggatgccagtttgcacgtcggaacgaaggagtttgatatttcaaaggtttccgaggtggattctgttgatgatttactcattgataatgccgctcgttatctgctgaaagactggaaaggggttggtgaactggttaatggtgttgaggttgcactggaatatacggcagaacgagggatcgcgctgcttaagcagaatccagagttgtactggcagatccttgcagaagcagccagcatcgcccagggtaaagagcagcagaagcaggatacgataaaaaagccatagctgcccagcggtggttatcggagttcgggggagaaaggggggaaaaggcaagatggaagcgagaaaaactcaggttgccaccgataccggaaccagaaatagacccggtgcttaaggagttgttgtacgcctattcggtaatatcccgtgcccgacgttatgctggaatggctggggtgcctttgcctttatctctgacagagataaatgaatatttagccactcatccggtattgattgagcgcgatgaatttgaagcagtgatctttgcactggatgaccagtattttcaggagcagtgtgtgtagttgttaattacgtacactctgttacagagatgtgatggtgtctttaattaaatcgatgatgctcctggagaaaagcattgcgtggcctcgtaatcgctatatctactattatgtcgcctgaaacccacttcgcggtgggttttttgttgtcaggagttttaataaatggcagagcaaacctcgcgtctcgcaataattattgatagcactggagcgaaaaataatgctgacaatctgacctcctcattagtcaaaatgacgcaggctggggaaactgctgcaaatagcgcagggaaagtgactaaggcaacagaagatgagaagaacgcgctcgcaaaattaaaagcagctattgatccagttggtgccgcaattgatactgtcggtcgacgctattctgaattaaagaaatttttcgataaagggcttattgataaagaagaatatgaatttcttgtccgtaaacttaatgaaaccacagaggaattgagcggggttgcgcaagcgcagagagaagccgagaaggccggaaaacttgctgccgctcagcaggaagcgcaggctcaggcctttcaaagaatgctggacaagatcgaccctctggctgcggcgctaagaaatcttgaacaacagcatgatgaacttaatgctgcgtttgcatccgggaaaataaatggttctcagtttgagaattatagccgaaaaatacaggaaacacggcgagagcttaccggagaggctcaggcagagcgagaagcagcaaaagcgcatgatgaacaggttgttgctttgcaacgtctgattgctcaacttgatcctgtcggaactgcttttaatcgtctggtagaacaacagaaacagctcaatgaagcaaaagctaaggggatgctttctcctgaaatgtatgaggagctttctggaaaacttcgtgctatgcggagtgagcttgaggttactcaatcacaattaagcaaaaccggaatgtcggcaaaacaaacggcttttgctatgcgcatgttgcctgcacaaatgacggatattgttgttgggttgtccactggtcagtcgccatttatggtgttaatgcagcagggcggccattcagctatgcaggagacaagaatcgccagcttacccgttacagcgatacccgctggcatgaagattccgtgcgtaaccgctggttcagcgtgatggtggggccgtctgtgcgcgtgaatgaatggttcagcgcgtatgcgatggcgggtatggcttacagccgtgtgtcgactttctccggggattatctccgcgtaactgacaacaagggaaggtgcgaataagcaggtcatttcttcccaagctgactcgctgattaaaatttcgcggatctgggccgatttttttcccgcaaacacatcgaatcagcctatttaggctattttttccaccatttctggcgttatttccggtttttactgagatctctcccactgacgtatcatttggtccacccgaaacaggttggccagggtgaataacatcgccagttggttatcgtttttcagcagccccttgtatctggctttcacgaagccgaactgccgcttgatgatgcgaaacgggtgctccaccctggcacggatgctggctttcatgtattcgatgttgatggccgttttgttcttgcgcggattctgcttcaaggtttttaccttgccgggacgctcggcgatcagccagtccacatccacctcggccagctcctcgcgctgtggcgctccttggtagccggcatcggctgagacaaattgctcctctccatgaagcagattacccagctgattgaggtcatgctcgttggccgcggtggtgaccaggctgtgggtcaggccactcttggcatcgacaccaatgtgggccttcatgccaaagtgccactgattgcctttcttggtctgatgcatctccggatcgcgttgctgctctttgttcttggtagagctgggtgcctcaatgatggtggcatccaccaaagtgccttgggtcatcatgacgcctgcttcggccagccagcgattgatggtcttgaacaattgacgggccagttgatgctgctcgagcaggtggcggaaattcatgatggtggtgcgatccggcagggcgctatccagggataatcgggcaaacaggcgcatggaggcgatttcgtacagggcatcttccatggcaccgtcgctcaggttgtaccaatgctgcatgcagtgaatacgcagcatggtctccagcggatagggccgtcggccattgcccgccttgggataaaacggctcgatgacagcggtcatattctgccatggcagaatctgctccatgcgggagaggaaaatctcttttcgggtctgacggcgcttagtgctgaattcactatcggcgaaggtgagttgatggctcatgatgtccctctgggatgcgctccggatgaatatgatgatctcatatcaggaacttgttcgcaccttcccaaggggaaaacgcacgacgtgctgaccggaagtgatgacggtcgccacagcaacacgtctctggcgtggggagctggcgtgcagtttaacccgaccgaatccgtggccattgatattgcttatgaaggccccggcagtggcgactggcgcactgacggtttcatcgtgggtgtcggttataagttctgattagccaggtaacacagtgttatgacagcccgccggttcaggcgggcttttttgtggggtgaatatggcagtaaagatttcaggtgtactgaaagacggcacaggaaaaccggtacagaactgcacaatccagctgaaagcaaaacgtaacagcaccacggtggtggtgaacacgctggcctcagaaaatccggatgaagccgggcgttacagcatggacgttgagtacggtcagtacagcgttattctgttggtggaaggattcccgccgtcacatgccgggaccattaccgtgtatgaagattctcaacccggtacgctgaatgattttctcggtgccatgacggaggatgatgcccgtccggaggcactgcgccgttttgaactgatggtggaagaggtggcgcgtaacgcgtccgcggtggcacagaacacggcagccgcgaagaagtcagccagtgatgccagcacatcagcccgtgaggcggcaacccatgcggctgatgctgcggactcagcacgcgcagccagcacgtcagccggacaggccgcgtcgtcggctcagtcagcgtcttccagcgcaggaacggcatcaacaaaggccactgaagcatcaaaaagtgctgccgctgcagagtcctcaaaaagcgcggcggccaccagtgccggtgcggcgaaaacgtcagaaacgaatgcttcagcgtcactacaatcagcagccacatctgcatccaccgcgaccacgaaggcatcagaagctgcgacctcggcccgggatgcggcggcctcaaaagaagcggcaaaatcatcagaaacgaacgcatcatcaagcgccagtagtgcagcttcctcggcaacggcggcaggaaattccgcgaaggcggcaaaaacgtccgagacgaacgccaggtcttctgaaacggcagcgggacagagcgcctcggctgcggcaggctcaaaaacagcggctgcgtcgtctgccagtgcagcgtcaacaagtgccgggcaggcctcagccagtgccaccgccgccggaaaatcggcagaaagcgccgcatcgtctgcttcaacagccacaacgaaggctggcgaagccactgaacaggccagcgcagcagcgaggtctgcttccgcagcgaagacatccgaaacgaacgcgaaagcgtcggaaacaagcgcagaatcctcaaaaacggctgccgcatcgtcagccagttcggcggcgtcatcggcatcatcggcgtctgcttcaaaagatgaggcgaccagacaagcgtcagcagcgaagagcagcgccacgacggcatccacgaaggcgacagaggctgctggcagtgcgacggcggcagctcagagcaaaagtacggcggaatccgcggcaacgcgcgccgagacagcagctaaacgggcagaggatattgcatccgccgtggcgcttgaggatgcaagtacgacgaaaaaggggatagtacagctcagcagtgcgaccaacagtacgtctgaaacgctggcggcaacgccaaaggcagtaaaatcagcctatgacaatgcagagaaacgtctgcagaaagaccagaacggcgctgatatacccgataagggatgcttcctgaacaacattaacgcggtcagtaaaacagactttgctgataagcgtggtatgcgttatgtgcgggttaacgctcctgcaggtgcaacatctggaaaatattaccctgttgttgttatgcgttctgctggctcagtaagcgaactggcatcaagagtcattatcaccacggcaacgcgaaccgcaggcgatccgatgaataactgcgagtttaacggatttgttatgcctggtggctggactgacagggggcgttatgcttatggcatgttctggcaatatcaaaacaatgaacgagccattcactcaataatgatgagtaataagggcgatgatttgcgctctgtgttctatgttgatggcgctgctttccctgtttttgcgtttattgaagatggcctgtcaatatccgcacctggtgctgatctcgttgttaatgatacgacctataagtttggggcaacaaatccggcgactgaatgtatcgcggcggacgttatccttgattttaagagtgggcgtggtttttatgagtctcattcgttaatcgttaacgataacttgtcgtgcaaaaaactttttgccacagacgaaattgtagcgcgtggtggtaatcagattcgaatgataggtggggagtatggtgcattatggcgtaatgatggcgctaaaacttacctgctgcttaccaatcaaggtgatgtttatggtggctggaatacattaagaccgtttgctattgataacgcaaccggcgaactggttattggaaccaaactgtccgcaagtctgaacggtaatgcattaacagcaacaaagctgcaaacgccaagacgggtttctggtgttgagtttgatggttccaaagatattactttaaccgccgcgcatgtggctgcttttgccagaagggcaacggatacatatgccgatgcggatggtggcgttccatggaatgccgaatctggcgcttacaatgtcacccgctctggcgacagctatattctggttaacttctataccggagtcggaagttgccggaccctgcagatgaaggcgcattacagaaatggtggtctgttctaccgttcttcaagagacggttatggttttgaggaagactgggcagaagtttatacctcgaaaaatcttccaccagaaagctacccagtcggcgcaccaatcccgtggccatcagataccgttccgtctggttatgccctgatgcaggggcaggcttttgacaaatctgcttacccgaaacttgcagccgcttatccgtcaggcgtgatccctgatatgcgtggctggacgattaagggcaaacctgccagtggtcgggccgtattgtctcaggaacaggacggcattaaatcgcatacccacagcgccagcgcatccagtacagatttggggacgaaaaccacatcgtcgtttgattacggcactaaatccacgaataacaccggggcacatacacacagtgtgagcggctctacaaactcggctggagcacacacacactcactagccaacgtgaacacggctagtgctaactccggtgctggtagtgcatcaacaagattgtctgttgtgcataatcaaaactatgcaacatcatctgctggcgcacatacccactcactgtccggcactgctgcaagcgcaggtgcacacgcgcatactgtcggtattggtgctcatacgcactccgttgcgattggttcacatggacacaccatcaccgttaacgctgctggtaacgcggaaaacaccgtcaaaaacatcgcatttaactatattgtgaggcttgcataatggcattcagaatgagtgaacaaccacggaccataaaaatttataatctgctggccggaactaatgaatttattggtgaaggtgatgcatatattccgcctcatacaggtctgccagcaaacagtaccgatattgcaccgccagatattccggctggcttcgtggctgttttcaacagtgatgagtcatcgtggcatctcgttgaagatcatcggggtaaaacggtttatgacgtggcttccggcaacgcgttatttatttctgaactcggtccgttaccggaaaatgttacctggttatcgccggaaggggagtttcagaagtggaacggcacagcctgggtgaaggatacggaagcagaaaaactgttccggatccgggaggcggaagaaacaaaaaacaacctgatgcaggtagccagtgagcatattgcgccgcttcaggatgctgcagatctggaaattgcaacggaggaagaaatctcgttgctggaagcatggaaaaagtatcgggtattgctgaaccgtgttgatacgtcaactgcacaggatattgaatggccagcactgccgtagggtaaaacatataaattctataattagatgtatctttccatttacggcaaggaagggggcttggaagacgtaaagcatctcacaccgagattattttttatatgtcaggtgtctgaagttttgctttggctcttaaaatggtttgccgcgaggttttgaattcccgggcaatggcacttatacttacacctgacttaattcgttcgaataccacctgtttctgttcttcatttaacacaggaggtcgaccaaaacgtttccctgcgccgcgggctcttactatcccggaatgagtgcgttcaagtaaaaggtctcgttcaaattcagcgactgctgaaattacttgcatcatcatttttcctgttggactggtcaggtcaatgccacccaatgctaagcaatgcactctgatacctgtttcggtcagttgttccactgttttcctgatatccattgcattacaaccaaggcgatccagttttgtcacaatcaattgatcaccacatttcaggcgagcaagcaaccggttaaaaccaggacgctcactggttgctgctgagccgctaatgtgttcttcgattatttgctgaggtttgattttaaaacctgcactttcgatttcccggcgttgattttcggtggtctgatccagcgttgatatccgacagtaagcaaaaattcgagacatagtgagactctatacgaaattggtgttcatatcataatgcatctcagaaaataattatgattatttttgtgcatatttgtatgtacacgttcgaaaataaacgaatgcgtatgcaaccccgtaattttggtgagacccaaaatcgattttgtgaaaaatggctttaactcggtttgtttttcgagttccgggcggactcaaggaagaagaatagtgttgcgtgttattttaaccagatttcaagttgtttggtcgtggaaaagtggagcaaaatgttgttaaagtggaaaaatgataaaaaagtaagtttattatattacattttaccatttaaattttggttgtctttaagaactgatatcgctgtttgtaataattctttgttatccagccatgatgttttctttatgtttccttcaatgtaatcaagcaatgttctggtattgataggtcttccctgttttgctacttccactacagcatcccctaggataattcttacttcaggaagctgcgcagggaaccactttagggtgtcttttgatttcatgaagatattccttaaaatattattgattttcattgcgatattgtatgtctgattcaggatatgttgacttatacatcggttttgtctgggttattggatatgccaatccctaattttattagagcatgactaaaaatgctgaatatgataaggagcgaagtgattatcagtatgctgttcatatagcctcgaattagtaatgtgttatatatgatatagttgacaatttttatcctgggtgttcttaaagttcgtagataaacattgtcgtttcaggtatacaggaatgctaacaggtggcggcaaaaatcaggcggtttatggcgcaagctgaagtggcaactgcaaactatcttatgcagagactctacacggattgggtttaaaagtatacatagataacagtttttatctgaagaagaaaaatatcaaggtgatatagcctatatgcctttgatgcggaggaatgaatgtgatgggagtgatgtatctgaatagttgaaaaaccgcagtcacgtcgtatgcaagaacgtgctgcggttggtttgactttgattgagacgttttggaatttttttcggtggcaaaaatggggcaaaacgctgcaaaaggggcaaaaaaggggcaaaaaaagagtggattatcgtagcttattgttgtcgctgatgatatttaacacattgaaaaataagtaaaatacttatgagtcagagagttgtgatttttgcccttacttgttcaggttgtattgttctttcttactaatttcttgattttgcgacatttaaaagcgactcaattcgttatatggcatcagaagagtatgcgtcatgccggaacgcccagcataagaaatctgatataaaaaactgtggcgtgtatggtacggattagaggggaaaatgtcagcacatttgcgaaatgaatcaaaaagcccgcagcaatgtgcgggcgttagtgtcagcgcacaaccagcacggagcactctgcgtgacgcactacagctgcggcgttggaaccgagcagataagtggtgatatccggtcgatgggaagcaatgatgatcatatgagcggggatcttcttcgccaattccagaatgcggtctttgggcgagccttcctcaacatggacatgcactctgtcggttggcagtttaaattttttaatgatctcttccagttgcgatttggcttccgctttcaggtcatccattgccggtaattctgcggaatacgctaaacccagagaggcatagtagggcagtgaaggtattaccgtcaggaaatgaacctctgcatcatcaatctttgcctcttcctcaacgtggctaatcacgcgttgagttaattctgaatcggaaatatcgatagggacaagaatcgttctgttcataaaacctcctgttttagtatccgcataaagtgtaacgccagatgacactttttgtgtaatgacggagttcacatttttaatttagatcaaaggaggaagaataagcagaaaaagcccgccataacagcgggcaggaggatttagaactgataaaccagacctaaagcgacaatatcatcggtagagatgccattggcagcgtagaagctgtcatcttcatccaacaggttgattttatagtcaacgtaggtggacatgtttttattgaaatagtaagtcgcgccaatatcggcgtatttaaccagatctttatcatcaacacctgccgggttgtctgcaccacccgcagcgtgcaggtcacggcctttagacatcaggaaagagactgccggacgcagaccaaaatcaaactggtactgtgcagtgacttcaaaattctgggttttgtttgccacagcataatcgctgtcgccaaacggggtcatattacgcgtttctgaatacatggttgccaggtaaatattgttagcatcgtattttagcccagcagtccacgcgtctgctttatcaccacccgccgcagtatggttaacctggtcattggtgcggtcagaagaggtgtatgccgcaccagcgctaaagcccatgcctaaatcatatgttgtggaaagaccccagccgtcaccgttttcatggcgaacatcacgtccgttgttggtgccttcctgaccattactggctccttcgttgttaccttgatactgcaccgcgaagttcagaccatttaccagaccgaagaaatcagtattacgataagtcgcgacgccattggctcgaccagtcataaagttgtctgcattggtataagagtcaccgccaaattcaggcagcatatcggtccagccttcgatgtcgtacattacgccataattacgtccgtaatcgaaagaaccgtaatctgcaaatttcagcccggcaaatgccagacgggtccatgactggttttttgaagattcagtgttgtttgcctgaatattgtattcccattgaccgtagccagtgagttgatcgttaatttgggtttcgcctttaaaacccagacgcgcatagctctggtcgccatctttcgctgaattatcagaaaaataatgcaggccatcaactttgccatacagatctaatttgttgccgtctttattataaacttcggctgcatgtgcagcacctgcggcgagcagggcaggaattaaaagtgccagtactttgcttttcattgaataaatcctttagttattttatttgccttttatccccatttcggggagtgaaaacatcctaaaggagaagttcagttagccgataaatatcatttgttacgccttaagtaaaaccttaatcaaataattcctctgaaatgataataagtctggtgaatgtatcgaagataatacatacaaaataaaaattatacttttaatttgctatacgttattctgcgcgggttatatgcctttattgtcacagattttattttctgttgggccattgcattgccactgattttccaacatataaaaagacaagcccgaacagtcgtccgggctttttttttagaattggataatccttatccagagcatttaatcggtgttgcttttttccgcttttccggccatttgtgccaggaagtcatagcgtttttgcaaatcagctgcagcatctttccataactgttctgccacttctggctgctgcgaattcagccgacggaaacgttgctcgtgaagtaacgtttcttccggtgcttctgacggcgggcgtgaatccaaggccagcggcagtttgccttcatcggcacgacgcggatcaaagcgatatagcggccagaagccggtagctgtgagttggcgcatctggtcgtggctgagtgccagatcgtaaccatgctcttcacacgggctataagcaatgatcagcgatggccccggatacgcttccgcttcctgaatcgctttcaccgtctggttcagctgcgcgccgagagaaatctgcgccacataaacatgaccgtacatcatcatactgacgccaagatctttacgcgctttacgtttgccgtgctcgccaaatttagttactgcacccagcggtgtcgctttcgacgcctgaccaccggtgttggaatagcattgcgtatccagcaccagaatgttgacgttttccgtcaaactcaatacatgatccagaccgccaaagccgatatcgtaagcccagccatcaccaccaatcagccagattgatttttccaccagtgcatctgcatcacgtagcagttcatgtgcttcggcaacatcgttgagttgctggcgtaaagctgcaacctgttcacgacgaacctctggcgtggcgtctgatttcaacgccgtcagtaattccgccgggattttatcggcaaattgatccagcagacgcagcacgcggacacggtgttgatcgaccgtcaggcggaaaccaaggccaaattcggcattatcttcaaatagagagttcgcccatgccggcccacgaccgttggcatcggtggtatacggtgtagagggcaggttaccgccataaattgaagaacagccagtggcgttagcgatcaacatccggtcgccatagagctgagtcagtaatttaatatacggcgtctcgccacaaccggagcaagcacctgaatattcaaacagcggtgtaatcagctgcgatgtacgaatatcaatacgttccagtttgctacggtcgatttctggcaggttgaggaagaaatcgtaattgattttctcttcttcgacatgttccaggcgagacatcatattgatggctttaatctctggattctgacggtctttcgccgggcaaacttcgacgcacaggttacaaccggtgcaatcttccggtgccacctgcaagacatatttctgcccgcgcatatcacgcgatttcacatccagcgaatgcaggctggcaggggcgttttccatcgcttcaggcggcaccacttttgcgcgaatagctgagtgtgggcaagcggcaacgcagtggttacattgggtacagagttcctctttccagatggggatctcttcggcgatattgcgtttttcccagcgcgtagtgcccatcggccaggtgccgtctggcggcagcgccgaaacggggagggcgtcaccaagcccggcgagcatcgcagcggttacggttttcacgaaatcaggggcggcatcggaaaccactggcggtcgattggcgctgtgcggatttaccggttgcaacggaacttcttctacggattcacgcgccagcgccagagcctgccagttgcgttccaccagatcctggcctttgctactgtaacttttggcaatcgcaccctgcaattctgcgagggcgctatcgccaggcagaatttgcgtcagatggaaaaaagccatctgcatgacggtattaatacgggccgccaggccacattcgcgggcgattttcgccgcgttaatcacatagaagcgcgcttttttctggtttaacacggcctgaacttcttgcggcaagcgcgaccacacttcatctgcgctgtacggcgtgttgagcaggaaaatgccgccaggttttaaacgctcagccatctgatatttatcgataaactgcaactggtggcagccaacaaaatcagcctgggaaatgagataagcggaacgaatcggctgttcgctcactcgaaggtgagaaaccgtcaggccgcccgcctttttggagtcgtaaacaaaatagccctgtgcgtaccacggcgtggaattaccgataatcttgatattgtttttggtcgcggaaacgctgccatcactaccaaggccataaaacaaggcttccagtttcgccgagtttggcagggtgttttccggcaacggcagtgacagattggtcacatcatcgtaaataccaaccgtaaagcgcgctttcggtttagccgcgttgagctcggcaaataccgccagtacacagtctgggccaaattctttggatgaaagaccatagcgcccaccaatgacacggggcagagtttcgcgctcgccattattaaaggcttctgccagtgcggtcattacatccagatagagcggttctgcctgggcaccgggttctttggttctgtccagtaccgccacgctgcgtacggatcccggcagagcttgcagtaaatgtttagcggagaaggggcggtacaggcgaactttcagcacgccaactttttcgccacgggttagcaattcatcaaccacttcttcacaggtgccaatggcagagcccatcaggataatcacccgttccgcttgcggatgcccgtaatattcaaacggctgatactgacgacctgtcgcggcagagaaatcattcatcgcctgttcaacatggtcatagaccgcgttgtaccatgggttggtggcttcgcgagactggaaataagtgtcaggattggcggacgtaccgcggatcaccggatgttccgggttgagtgcccgggcgcgatgagcatcaatttcgacctgcggcatgagatcaagaatcgtgtcatcggccagcgggacaattttattgatttcgtgggacgtgcggaaaccatcaaagaaatgaataaatggcacgcggcttttcagcgtcgcgatttgcgaaatgagagcaaagtcttgcgcttcctggacgtttgctgcacacaacatcgcgcaacccgtctggcgcaccgccataacgtcggaatgatcgccaaaaatagagagtgcatgtgtggcaacggtacgtgccgctacatgcaggacaaacggtgttagttcgcctgccagtttgtacagcgtcgggatcatcagcagcaaaccctgcgatgacgtaaacgatgttgaaagggcacccgtctgcaaagcgccatgcacggtagcgatagcacccgcttccgactgcatttcaaccacgcgtggtgtgtctccccaaacgttctttaagccgtttccggcccaggcatcagcctgttctgccatcgtggaactgggggtaatagggtagatggcgataacttcactggtgcgaaatgcgaccgaagcaaccgcgccattaccgtcaatagtaatcatatgacacccttacattgcgcaaatgaggggcgcacgaaattgctgcgcgcccagtagtaatctttcaattttagcaaatggctttcttctgcattttcgcttttgtgtcccccacatcagcgtaatgaatgttttgatcaaacagagggcaaaaaaatagccataaaaaagtaaaaatgcggggcaacgcgcaggacagctctcgacgccgccctctgtgctgcctattatttatggcggtgtcgtttggcttgaagatcagaggaagaaaagatgcgagcagcgttttgggtagggtgtgccgctttattgttgtcggcgtgtagtagtgaacctgttcagcaggcgactgccgcgcacgtagcgccaggtttaaaagcgtcgatgtccagtagtggagaagcaaattgtgcaatgatcggcggttcgctttctgttgcccgtcaactggatggtacggcgattgggatgtgtgcattacccaacggcaaacgctgtagcgaacagtcacttgccgccgggagctgtggcagctattaattcattaaatccgccagcttataagttaatgtctgttttgcggtcgccagcgttaactggttcgcggtcagatccacttgtgcaccttctttcagcatttcgctaatggtgttatcgagttcattaagctgcgggttagcgcacatcatacgggtcattgccagccctttggctgtcagttcaccattagacagtttgccttcaccgctaaagcggttacacatgctgccggaaatcatcattttttcaccaaagctgatttctggcggatttttatcgctggtcacgggcttaccgtttacgctttccagcacaaagcgatgatgctgtagctgttctggcgtaacagcaattttgtcattacttacacatcccgccatcagcaggcttagcgcaacaaacgcggctactttcttcattgtggttctcaattacagtttctgactcaggactattttaagaatagaggatgaaaggtcattggggattatctgaatcagctcccctggaatgcaggggagcggcaagattaaaccagttcgttcgggcaggtttcgcctttttccagattgcttaagttttgcagcgtagtctgagaaatactggtcagagcttctgctgtcaggaatgcctggtgcccggtaaacagcacgttgtggcaggcagacaggcgacggaatacgtcatcctggatcacgtcgttggatttatcttcaaagaatagatcgcgttcgttctcatacacgtccatacccaacgaaccaattttctgatttttcagcgcttcaattgctgcctgagaatcaatcaatgcaccgcgactggtattgacgatcatcacgccatttttcatctgttcgaaggcggcttcgttcaacagatgatagttttccggtgtcagcgggcagtgcagagagataacgtctgattcagagaacagggttggcagatcgacatactccacaccgagttccagcgccgctgcacttggatacggatcgaacgccagcagacgcataccaaaacctttcagaatgcgcagcatcgccacaccgattttaccggtaccgataacgcctgccgttttgccatacatagtaaagccggtcagaccttccagagagaagttagcatcacgggtacgctgatacgcgcggtgaatacggcggttcagcgtcatcatcataccgatggcgtgttcagcaacggcctctggatcataggctggaacacggactactttcagccccagttcttttgccgcgtcaaggtcgacgttattgaaaccggcacagcgcagggcgatatatttaacgccgtgctttttcagctcttccagcaccgggcggctgccgtcatcgtttacgaaaatacataccgcttcgcagccattggcagttttagcggttttttccgtcagcagaaagtcaaaaaattccagctcaaagccaaaggactcgttcacctgttgcaggtacttcttgtcgtactgttttgtgctataaacggcgagtttcataagactttctccagtgatgttgaatcacatttaagctactaaaaatattttacaaaatttcaaatttaattgaaagctatggcgatattgaaaaattcatcaacaactatgcttagtgtaggcgcaaccttcaactgaacggttaaacatgccacaatacccgtattgaatgcttaatttttcgctaaatcaggatattaactacccatgctgggtaaatataaagccgttctcgcgctgttattactgattattcttgtgccgttgacgctgctgatgacgctcgggctgtgggttcccacgctggcgggcatctggctaccgctcgggacacgtattgcattagatgaaagcccacgcattacgcgtaaaggtttaatcattcccgatctccgttatctggtgggagattgtcagcttgcgcatatcaccaacgccagcctttcacatcccagccgctggttattgaacgtcggcacggtagaacttgattctgcttgtctggcgaaattgccgcagacggagcaatcgccagccgctccaaaaacactcgcgcagtggcaggccatgctgcctaacacctggatcaatatcgataaactgattttttctccctggcaggaatggcagggaaaactctctctcgcattaacctctgatatccagcaactgcgttatcagggcgaaaaagttaaatttcaaggccagctgaaagggcaacaacttacagtcagcgaactggatgtcgtcgcgtttgaaaatcagccgccggtaaaactggtgggggaatttgctatgccgctcgtgccggatggacttcctgtaagtgggcatgctactgcgacgttaaacttgccgcaggaaccgtcactggtggatgccgagctggactggcaggaaaatagcgggcaattgatcgtgctggcacgggataacggcgatccgttgctcgatttgccgtggcaaattactcgtcaacaattgaccgtaagcgatggtcgctggagctggccgtatgcaggttttcctttgagtggccgactgggtgtcaaagtcgacaactggcaggcagggcttgagaacgctctggtcagcggacgactgagtgtgctgacccaggggcaagcgggtaagggcaacgcggtgcttaattttggcccaggaaaattaagcatggataacagtcagctgcctctgcagctgaccggtgaagcgaaacaggcggacctcattttatatgcccgtttacctgcgcagctaagtggaagtctgtctgacccaacgctgacctttgagccaggcgcgttacttcgttcaaagggaagagtcatcgattcgctggacatcgatgaaatccgctggcctttagcgggtgtaaaagtcacccaacgtggtgttgacggacgtttgcaggccatcttgcaggcgcatgaaaatgaactgggcgatttcgtgctgcatatggatgggctggcgaatgattttctccctgacgctggccgctggcagtggcgctactggggaaaagggagttttacaccgatgaatgccacctgggatgtcgcaggaaaaggtgagtggcatgacagcacgattacgctgaccgatctctccaccggtttcgaccagttacaatacggtacgatgacggtagaaaagccgcgattaattctcgacaagcccatcgtctgggtacgtgacgcacagcatccctcctttagcggcgcgctgtcactggacgccgggcaaacgctgttcactggcggcagtgtgttaccgccatcaaccttaaaatttagcgtcgatgggcgcgatcctacctatttcctctttaaaggcgatttacatgctggtgagattggcccggttcgggtaaatggtcgctgggacggtattcgtctgcgcggtaacgcctggtggcctaaacaatcactgaccgtattccagccgctggtgccacccgactggaagatgaacttacgcgatggtgaactgtatgctcaggttgcattttctgctgcgcctgaacaaggattccgcgcgggaggacacggcgtgttgaaaggcggtagtgcctggatgccagataatcaggttaacggtgtcgattttgtcctgcctttccgttttgccgatggagcctggcatctggggactcgcggccccgttacgttgcgaattgccgaagtgattaatctggtgacagcgaaaaatattacggctgatttgcaagggcgttatccgtggactgaagaagaacccttgctgttgactgatgttagcgtcgatgtgttaggcggtaacgtactgatgaaacaattacgtatgccgcaacatgacccggcgctgttgcggctgaataatctctcatccagcgaactggttagcgccgtcaatccgaaacaattcgccatgtccggggcatttagtggtgcactgccgttatggctgaacaatgaaaaatggattgtgaaagatggctggctggcgaatagcgggccgatgacattgcgactggataaagacactgcggatgcggtggtaaaagacaatatgactgcgggttcagcaattaactggttgcgctatatggaaattagccgttcatcgacaaaaattaatttagataatctcggtttattaaccatgcaggccaacattacaggtaccagtcgcgttgatggtaaaagcggtacggtaaaccttaattaccatcatgaagagaatatttttacgctgtggcgcagtttacgctttggcgataatctccaggcatggctggagcagaacgcacgtctgccgggaaatgactgtccgcaaggaaaagagtgtgaggaaaaacaatgaaaattttactggctgcgttgacgtcatcttttatgctggttggctgtacgcctcgcattgaagtcgctgcacctaaggaaccgatcactatcaatatgaacgttaaaattgagcatgagatcatcatcaaggcagacaaagatgtcgaagagctgcttgaaactcgtagcgatcttttctgaggtgatgatgaagaaaacattacttctttgtgcgtttcttgttgggctggtaagcagcaatgtaatggcattgactctggatgaagccagaactcaggggcgggtaggtgaaacattttacggttatctggttgcgctgaaaacggatgctgaaacagagaaattagtagccgacattaatgccgaacgtaaagcgagttaccaacaactggcaaagcaaaataatgtgtcggtagatgatatcgcgaaactcgccgggcaaaagctcgtagctcgggccaaaccgggggaatatgtacaagggataaacggtaaatgggtgcgaaaattttaatagcaaaaccgcaatatcgggataacgctacaggagaaggcgattgatctattttcctgaaacaaggtgaatattcaaaaactcctgtcaaattgccttttgccctgaaaaatgcatagtcaaatatctgttttaactaattggcgttgcagtacatgcaacgccaattagttagcggaatttacgtcgatactcgcctggcgtcatcccaaagcgttgcttaaataccgttgaaaaatgactctggtcagaaaatccccaatgaaagccgatgcctgccagtttttcatcatctgcggcatggcgaatcgcatctgcacaaaaatcgagacgacggttacgaatatattgcgcgactaccaaacctttatcggcaaacattcggtacaaactacgtactgacatacctgtctctccggctatccactccgggcgtaatatctcttcgcgaatattatcgtctatcaacgtaaccactttttgaaactgacgttcacgacgaggttgaacagattcccgctgatgaagtaccgggcgcagcagacacaccatcgcctgtagcgcagcttcactttctgtttcagaaagtgccggattattcatgctctcctgtaacaggcgatgactgagttgcaccatgggtaagtcagcgtccagtctttctgcgcagataggtttttgatggggaaaatattgttccagcagagtgcgtggcaaaagtaatgaaatctgtttagaagactcctgccagtaaagcgaacaggggcgtgaggcatcgagtaacgtaatatcgccagcgccaatctgcacctgacgctcatcctgctccattattgcctgaccactaagctgaaaaacggtgtaaaaccaggcatcgtcgctgccttttacttcctgccaggtgcgggataaattcaccccgctggttgtcacggtactcagctttagtcctttggcaaaatgcgtgtccagtacacccgtgtaacgctcagtcagcaggcgtccggtaaaatttccgcatacctgattgatttgggaaagccattgctgaaactcattatccactgcggggttcatggcacgttttcgctctgtgaaatgtatttttattgttgcatttgtgttgcaataaacgaagctaatgagcctgactataggaaataagtcttgtcaggcatagagacataagcggttattgtcacgatttgcggagcttgtcacagctgacaaagcgaatgtcacagcgaaaaaagtgacttttcttgtcgctgcgtacactgaaatcacactgggtaaataataaggaaaagtgatgacagagccgcatgtagcagtattaagccaggtccaacagtttctcgatcgtcaacacggtctttatattgatggtcgtcctggccccgcacaaagtgaaaaacggttggcgatctttgatccggccaccgggcaagaaattgcgtctactgctgatgccaacgaagcggatgtagataacgcagtcatgtctgcctggcgggcctttgtctcgcgtcgctgggccgggcgattacccgcagagcgtgaacgtattctgctacgttttgctgatctggtggagcagcacagtgaggagctggcgcaactggaaaccctggagcaaggcaagtcaattgccatttcccgtgcttttgaagtgggctgtacgctgaactggatgcgttataccgccgggttaacgaccaaaatcgcgggtaaaacgctggacttgtcgattcccttaccccagggggcgcgttatcaggcctggacgcgtaaagagccggttggcgtagtggcgggaattgtgccatggaactttccgttgatgattggtatgtggaaggtgatgccagcactggcagcaggctgttcaatcgtgattaagccttcggaaaccacgccactgacgatgttgcgcgtggcggaactggccagcgaggctggtatccctgatggcgtttttaatgtcgtcaccgggtcaggtgctgtatgcggcgcggccctgacgtcacatcctcatgttgcgaaaatcagttttaccggttcaaccgcgacgggaaaaggtattgccagaactgctgctgatcacttaacgcgtgtaacgctggaactgggcggtaaaaacccggcaattgtattaaaagatgctgatccgcaatgggttattgaaggcttgatgaccggaagcttcctgaatcaagggcaagtatgcgccgccagttcgcgaatttatattgaagcgccgttgtttgacacgctggttagtggatttgagcaggcggtaaaatcgttgcaagtgggaccggggatgtcacctgttgcacagattaaccctttggtttctcgtgcgcactgcgacaaagtgtgttcattcctcgacgatgcgcaggcacagcaagcagagctgattcgcgggtcgaatggaccagccggagaggggtattatgttgcgccaacgctggtggtaaatcccgatgctaaattgcgcttaactcgtgaagaggtgtttggtccggtggtaaacctggtgcgagtagcggatggagaagaggcgttacaactggcaaacgacacggaatatggcttaactgccagtgtctggacgcaaaatctctcccaggctctggaatatagcgatcgcttacaggcagggacggtgtgggtaaacagccataccttaattgacgctaacttaccgtttggtgggatgaagcagtcaggaacgggccgtgattttggccccgactggctggacggttggtgtgaaactaagtcggtgtgtgtacggtattaatctggttcgctcataagtaaaaaacggcacctggtgccgtttttttgtctgaaacaatcacttatctttcttcagcgcccctagcgttggcgtttcgtcaaagaagttccatggtttcagcagagtatgtacccattcggtcggcataatcggccactcttcggcgcgggccacatgtgtggtgccggtggtcatccagacaacggcgtcggtgttgtccagcgactcgttatccttactgtattgtccaagaccggtgtcatgagtagaacggttcggatatttgccttccgggaaacgctcgccaggatgataacgcgttacccagagctgcttgtccataaagcttaaacgatgatagatccactcgtccggcgcgaactgggcaccttttgctaccgggtgagtaccacctgcataaggaataatttgataggaaaccggattgcccatgcggttctctttgttcgggttactcaacagacgaatcgtgcccggatcaaatttctgtgcggcatcctgttcattgccgatgttgtactgattaacttgcatggtactggtgcgtgggccaccggcagtattcggttttaccactgggtccatcgccaccaggctgttattctcgccatctacatccagatcgaggcggaaattataaatatgttggtgtgtagtacccacgatattgtgatcgataagcgtgccgtagcgcgtgtcatctttcgccgtctcatcgtgcatggttttcgctttaacacctttcaccgcttcgatgcccgtagcaccggcatcgatgccaatagtgccgttttcatggaagatccagtcaaaaatgtagtcatagttacccactgtactgatccagcgcaccactaactcccggcgttcggtactgacgttgggctggcccatttcctgatgcttatactccggcccggcataacgttcaaataccgcgatagcgcgagggatctccatcggcacgccagtgtagtcggcgatggtttcattaaggagcactgcgttagacggggcatctttaccacgagcaattggtgaggttagcgtgcccataccgtagtcaccagagtccagatacgctttaaagtaccagccaatatcaggatcaccgtaaggcacaatcatgccgccgagagaaccttcgtacatgactttgcgtttggtgccattgtcgttataagtcacggtggagatcatcggcccgacgcgagagttcatgctgaggtgaaaatcccagttccgccagtgaatcatatcgccagtaatggtgtaatttttaccttcaggctcaatgatttgcataggcttaactgccggagcaacgcggtcacggccatcaaatgggcgtgcggtcattggcaccggaactaccggaccttcttcaatcttaacgatttttttctgttctaaatcaacgaccgccaccaggttttcgatgggatgtgcccagtagttgccatcaccgacatcaagatagctgatgactttgagcaaccgggcatcttgtttcaggccatctttaccatcgaaataacctacggtcagcggcgtggtaatcacttttttcgcatcagtaataccgcgtttcttcacggcagcggcaaattcttcactgttgttaataatgttctgcacactggcgaaatcatccagcaacaccataccgtgggcgtctttaatgggttgccaggagagcagtttgttgttttgcagatccaccaccgcttcgatgatatgtttgccgtcgagcataatgacgtcggctttgcgcggctggtcaaccggtttgttttccagcgcaaacgcccagacagcttctttatctggcggtagcagggagatctcagtaaaacgggtattgggtttgaagtccgcggaagctttaacaatttcaacggcctgtttaatttcgtccgcagttagcgcattaagtgggtgagggcgcttttctacctgaaaggtttgatccagcccggactggaaaacatcgttaataaaggtgtcagaaacccaggctttattgtctttcatcactaccggtacttgcagtgccagaggctgaccattaacaattgctgtttgcgcaccaggcttcactttcacgtacgcgccatctttaatcagggtaaagagctgggcgtagtcgtcccactgcacatcggcaccaaattctttaagcgttttatccattggcaccatatgcgcttcaccaccgtgggcaaataccggcgcttgccaggcgaaacttaaggcgactgccaacgccagggttgttttacgggcagaatacagagaggggcttcccattattaacctcgtcagatgttgtgttcttgttagcaaccgcgctctgtgggcggtttagtcaggttcacattatcagtactgatgcaaaggggattgcctgcacctgccaggttgtttggcaggtgtgccagcttttcatacagtggatgccctgaaaatagatgtacacatcatgcataatgtgacaacgtcacaaaacttagtgaaataaaagggcaactattcgccgttgcccttcattcaccgattaatcgacaaaatcaccgtgctgcctggccaccagcgtcagaattgaatacagcgccaccggggtttgatgctgattgaatacctctacagcccattccaccacacctgttggtttttcttctgcgctacgctgttttttcagcgtcttgcgcttacaggtgagacgcacctggatggtatcgcctggctttacgggttcgataaaacgcaagctttccagcccgtagttagcaatgaccggaccgacaccggcatcgacaaacagacccgcagccgcagaaagcacaaaatacccatgcaccacccgctcaccgaaaatagattcggcagcagcaatcttatccatatgtgcatagaaatgatcgccgctgaggcaagcaaagttaacaatatcggcctctgtcattgtgcggcggggagtcaacaggctgtcgcctggttgtagctcctcaaaatatttgcggaacggatgaatacgatcttcttcgactttcgcaccgcgcacccactgtttactgatagcggcaagcatcgtcggactaccctgaacagcggttcgctgcatgtaatgtttcaccgctcgtaaaccgcctaattcttcaccgcctcctgcgcgaccaggcccaccatgtaccagttgtggcagtggggagccatgcccggtggattcttttgccgactcttcattgaggatctgaattcgcccatgcgtacgtgccgcgtcggcaataaactgacgcgcaatttgcggatcagccgtcaccagcgttcccgcaaggctaccgccgcctgcacaagccagttgcagagcatgtcgctggttttgtgctggcatcagcgttgcgacagggccaaaggcttctgttgcatgtaccgccggtgtttcatccggctgcggacagtacaataaggttggcgggaagaaggcacccgcagcagataaatccgcctgaccaccgaggcgaatctcgcatcctgcagccagcaatatgttcactttttcctgcacatcggcacgctgctcagcatttaccagtgcgcccattttcacgccttcctgagcaggatcaccgaccacgactttctgtaatcgcgcaaccagagcatcactgacagcattaaccaatgcctgcggcacaataatccgccggattgccgtacatttttgcccggcttttgtggtcatctcacgcacaacttcacgaataaacagcgcaaactccggttgatccggggtgacatcttcgcccagtacgcagcagttcagggaatcagcttccatagtgaaggggatagatttggcgacgatatttggctgaactcgcagcatctgtccggtcgccgctgaccccgtgaaagtcaccacatcctggctgtccagatgatccaacaagtcgccagcactaccgcagatcagactaattgcgccttcgggaacaagaccactatcgacaattgatttcaccatcgcctgagtcagttgggccgtcgcggtagctggtttgatgatggctggcattccgcccagccacgttggtgccagcttttccagcattccccagcaggggaagttaaaggcgttaatatgcactgccacgcctgactttgaggtcagtaaatggcgcgcggcaaatccaccttctttcgataaggggatcaattcatcttccggccacagcgtatcgtcaggcagctcccggctaccgaggctggcgtaagtaaataacgtcccaatgccaccttcaatatcaacccaactgtctgcccgcgttgcgcctgtttgcgcagaaagagcatagaaacgctctttttcactcagcagatgtttagcgaccgctttaagcatcgccgcacgttcgataaaggtcatagcgcgaagggcgggggcacctttttcaatggcaaactggcgggcagccgccatatcaagaccttcactggtcacttcccataacgcctcgccgctaatagcgtggtgaatcaaacggctacggccccggccagactgccaggtaccggataagaaactggctaactgctgcatcgctactctccagatgtttcacatttctgttgctaatagttaaatcgcgaatcataaaaagcaaaggatcttttaacgaaatgttaactatgcgatctgtatagcaactgcggaaaacattaatgcactgataaataatgatttataaaaatagggtgcgaaatccgtcacagttcaaacatacaaaatttgtgattttacttaactattgtgtaactttcataaaacaatgtgattcgtgtttttaattaattcacgaaaactggaatcgtaaaggtgatgacgtgacccaagaagaacgctttgagcaacggatagcccaggaaacggctatcgagccacaggactggatgcccgatgcttaccgaaagacattgatccgccagattgggcagcatgcgcactccgagattgttggtatgttgcctgaaggtaactggatcactcgcgcaccaaccttgcggcgtaaagccattctgttggccaaagtgcaggatgaagccggtcatggtctgtatctctatagcgccgccgaaacactgggctgcgccagagaagacatctaccaaaaaatgctcgacggacggatgaaatattcctccatctttaattatccgacattgagttgggctgatatcggtgttatcggctggctggtggatggcgcagcgatcgtcaatcaggtggcgttatgccgcacttcttatggcccgtatgccagagcaatggtgaaaatctgcaaagaagagagttttcaccagcgtcaggggtttgaagcctgcatggcactggcgcagggcagcgaagctcaaaagcagatgttgcaagacgccattaaccgtttctggtggccagccttaatgatgttcgggccaaacgatgataactcgccaaacagcgccagaagtctcacctggaaaatcaaacgtttcaccaacgacgaactccgccagcgtttcgtggataacaccgttccacaggttgaaatgctcggtatgaccgttcctgacccggatctgcattttgacactgaaagcggtcactaccgctttggtgagatcgactggcaggagtttaacgaagtaattaacggtcgcggaatttgtaatcaggagaggctcgacgccaaacgtaaagcctgggaagaaggtacctgggtacgggaagcagcgctggcccatgcacaaaaacaacatgcccgtaaggtcgcataaggagattcaaaatgagtaatgtttactggccgttatacgaagttttcgtgcgtggcaaacagggcttatcacaccgccatgttggcagtttacatgctgccgatgagcggatggcactggaaaatgcccgtgatgcttacacccgtcgtagcgaaggatgttcaatttgggtggtgaaggcgagtgaaattgttgcctcgcaaccggaagaacgcggtgaattttttgatccggctgaaagcaaggtctatcgccatccaacgttttacaccatccctgatggcattgagcacatgtgaggtcggaaatgaatcagttaacggcttacaccttgcgcctgggcgataactgcctggtgctctcccagcggttgggtgaatggtgcggtcacgcaccggaactggaaatcgatctcgcactggcaaacattggcctcgatttattaggtcaggcacgcaacttcttatcgtatgccgctgaattagcgggagaaggcgatgaagataccctggccttcacccgagacgagcgccagttcagcaacttattgttggttgaacaaccaaacggcaattttgccgacaccattgcacgccagtatttcatcgatgcatggcatgtggcgctctttacccgtctgatggaaagccgtgatccgcaactggcggcgatttctgccaaagcaattaaagaagcgcgctatcacctgcgttttagtcgtggctggctggagcgactgggcaatggtactgacgtatcagggcaaaagatgcagcaggccatcaacaagttgtggcgttttaccgccgaactgttcgatgccgacgagattgatattgcactgagtgaagagggtattgcggttgatccacgcactttacgcgcagcgtgggaagccgaagtttttgccgggatcaacgaagccacattgaacgtaccgcaagagcaggcgtatcgcactggcggtaaaaaaggactgcataccgaacaccttggacccatgctggcagaaatgcagtatctccagcgtgtcttgcccggtcagcaatggtaacagaggagatgggtatgcaacgtctggccaccattgcaccgccacaggttcatgagatatgggcgctactcagccagatcccggacccggagatcccggtgctgaccattactgatttaggcatggtgcgtaatgtgacacagatgggagaaggatgggtgatcggctttacgccgacatattccggttgtccggcaacggaacatttgattggcgcgatacgtgaggcaatgacaaccaacgggtttacccccgttcaggttgtgctgcaactcgacccggcatggaccaccgactggatgacccccgatgcccgtgagcgtctgcgagagtatggcattagcccgcccgccggacacagttgccatgcccatttgccgccagaagtacgttgcccgcgctgcgccagcgtccataccacacttatcagtgaatttggttccacggcctgcaaagcattgtaccgctgcgatagttgccgcgaacctttcgattatttcaaatgtatttgaggatgccatgacaacgtttcattccttaacagtggcaaaagtcgagtcggaaacccgtgatgcggtgaccattacctttgcggtgccccagcctttgcaggaggcgtatcgctttcgccccggtcaacatttgaccttaaaagccagctttgatggtgaagaattacgccgttgttactccatttgccgcagctatctgcctggcgaaattagtgtggcggtgaaagccattgaaggcggacgtttctcccgctatgcccgcgaacacatccgccagggtatgacgctggaggtcatggtgccgcaggggcatttcggctatcagccgcaggccgaacgccaggggcgctatctggcaattgcagcaggatcaggtattacgccaatgctggcgattatcgccaccactttacaaaccgagcctgaaagtcagttcaccctgatctacggtaaccgtaccagccagagcatgatgtttcgccaggcactggcagacctgaaagacaaatatcctcagcgtttacagttgttgtgcattttcagtcaggaaaccctcgacagcgatctgcttcacgggcgtattgacggtgaaaaattacagtcacttggggcctcgctcattaattttcgtctttatgatgaggcatttatttgtggtccggcggcgatgatggatgacgcggaaaccgccttaaaagcactgggaatgccagataaaaccattcatctggagcggtttaatacgcctggcacgcgcgtcaaacgtagcgttaacgtgcaaagtgacggacaaaaagtgactgtacgtcaggatgggcgggatcgggaaatcgtgcttaatgccgacgatgaaagcattctcgatgcggcattgcgccagggggcggatctgccctatgcctgcaaaggcggcgtctgtgcgacctgcaaatgcaaagtgctgcgtggcaaagtggcgatggaaaccaattacagtctggaaccggatgaactggccgcaggttatgtgttgagttgccaggcactgccgctgaccagcgatgtggtggttgactttgacgcgaaggggatggcatgagcgaactgatcgtcagccgtcagcaacgagtattgttgctgacccttaaccgtcccgccgcacgtaatgcgctaaataatgccctgctgatgcaactggtaaatgaactggaagctgcggctaccgataccagcatttcggtctgtgtgattaccggtaatgcacgcttttttgccgctggggccgatctcaacgaaatggcagaaaaagatctcgcggccaccttaaacgatacacgtccgcagctatgggcgcgattgcaggcctttaataaaccacttatcgcagccgtcaatggttacgcgcttggggcgggttgcgaactggcattgttgtgcgatgtggtggttgccggagagaacgcgcgttttgggttgccggaaatcactctcggcatcatgcctggcgcaggcggaacgcaacgtttaatccgtagtgtcggtaaatcgttagccagcaaaatggtgctgagcggagaaagtatcaccgctcagcaagcacagcaggccgggctggttagcgacgtcttccccagcgatttaaccctcgaatacgccttacagctggcatcgaaaatggcacgtcactcgccgctggccttacaagcggcaaagcaagcgctgcgccagtcgcaggaagtggctttgcaagccggacttgcccaggagcgacagttattcaccttgctggcggcaacagaagatcgtcatgaaggcatctccgctttcttacaaaaacgcacgcccgactttaaaggacgctaatgatggaattcatcctcagtcatgtagaaaagggcgtgatgacactaacgctcaaccgcccggaacgcctgaacagttttaatgatgagatgcacgcacaactggcagagtgcctgaaacaggtcgagcgcgacgacactatccgttgcctgttacttacaggtgccgggcgcggattttgtgctggtcaggatcttaacgatcgtaacgttgatcccacaggccccgcaccggatttagggatgtcagttgaacgtttctataacccactggtacgtcgcctggcaaaactgccaaaaccggtgatctgtgcagtcaatggcgtggcggcaggggcaggcgcaacactggcactggggggcgacatcgttattgctgcccgttcagcaaaattcgtcatggcgtttagtaagttaggcttaatacccgattgcggtggaacctggttactgccacgcgttgccggacgagcgcgcgccatggggctggcactgctggggaatcaactgagtgctgaacaggcgcacgaatgggggatgatctggcaggttgttgatgatgaaacgctggcagataccgcgcaacagctggcacggcatctggcgacacaaccgacatttggtcttggacttatcaagcaagcgataaatagcgctgaaaccaatacgctcgatacgcaactggatctggaacgtgactatcagcgacttgccggacggagcgcagattatcgtgaaggtgtcagtgcgttcctggctaaacgctcaccgcagttcacggggaaatagcatgatgataaatgtgcaaactgtggcagtgattgggagcggcaccatgggggcaggcattgctgaagttgctgccagtcatggacaccaggttttactgtatgacatttctgctgaagcgctgacccgcgcaatcgacgggatacacgcgcggctaaattcacgcgtgacgcggggaaaactgactgctgaaacctgtgaacgcacattgaaacgcctgatcccggtgaccgatattcacgcgctggcagctgcggacctggtcattgaagcggcgtctgaacgtctggaagtcaaaaaagcgctctttgcacagctggcggaagtttgcccgccacaaacgctattgaccactaacacttcgtcaatctctataaccgcgattgctgcggagataaaaaatcctgaacgtgttgcggggctgcatttttttaacccggcaccggtgatgaagttggtggaggtggtcagtgggctggcaacggcggcggaagttgttgagcagttgtgtgaactaacgttgagttggggtaagcagcctgtgcgctgtcattcgactcctggatttatcgttaaccgtgttgcgcgtccttattattccgaggcctggcgggcactggaagagcaggttgctgcaccagaagtgattgacgctgcacttcgcgatggcgctggtttcccgatggggccgctggaattaaccgatctgattggtcaggacgtcaattttgctgtcacctgttcggtgtttaacgctttctggcaggagcgtcgttttttaccttcgctggtgcaacaggaactggtgattggtggacggttgggcaagaaaagtgggctgggcgtgtacgactggcgcgcggaacgtgaggcagttgttggcctggaagcggtaagcgacagttttagcccaatgaaagtagaaaagaaaagtgacggtgtcacggaaattgacgatgttttattgattgagacacaaggcgagacggcacaggcgctggcaatacgactggcacgcccggtggtagtgatcgataaaatggcgggcaaggtggtgaccattgctgctgcagcggtgaacccggactcagcgacccgcaaggccatttattacctgcaacagcagggcaaaacagtgctgcaaattgcagattacccaggaatgctgatttggcgaacggtagcaatgatcatcaatgaagcccttgatgcgcttcaaaaaggcgtggcctctgaacaggatatcgataccgccatgcgtcttggggtgaattatccatatggcccacttgcctggggagcgcaacttggctggcagcgaatattaaggctccttgaaaatctacagcatcactatggcgaagaacgctatcgcccatgttcattgctgcgccaacgggcgcttctggagagcggttatgagtcataaggcctggcaaaatgcccatgcaatgtatgagaacgatgcctgcgccaaagcgcttggcatcgacattatctcaatggatgaaggctttgctgtagtgaccatgaccgtcactgcacaaatgcttaacggtcatcaaagttgccacggcgggcagctattttcactggctgatactgcctttgcctacgcctgcaatagccaggggctggcagccgtcgcttctgcctgcacgattgattttttgcgtccaggctttgccggagacaccttaactgctactgcgcaggtacgtcatcagggcaagcaaaccggtgtttacgacatcgaaattgttaaccaacaacaaaaaacggttgcgctgtttcgcggtaaatctcaccgcatcggcggcaccattacaggagaagcctgatgcgtgaagcctttatttgtgacggaattcgtacgccaattggtcgctacggcggggcattatcaagtgttcgggctgatgatctggctgctatccctttgcgggaactgctggtgcgaaacccgcgtctcgatgcggagtgtatcgatgatgtgatcctcggctgtgctaatcaggcgggagaagataaccgtaacgtagcccggatggcgactttactggcggggctgccgcagagtgtttccggcacaaccattaaccgcttgtgtggttccgggctggacgcactggggtttgccgcacgggcgattaaagcgggcgatggcgatttgctgatcgccggtggcgtggagtcaatgtcacgggcaccgtttgttatgggcaaggcagccagtgcattttctcgtcaggctgagatgttcgataccactattggctggcgatttgtgaacccgctcatggctcagcaatttggaactgacagcatgccggaaacggcagagaatgtagctgaactgttaaaaatctcacgagaagatcaagatagttttgcgctacgcagtcagcaacgtacggcaaaagcgcaatcctcaggcattctggctgaggagattgttccggttgtgttgaaaaacaagaaaggtgttgtaacagaaatacaacatgatgagcatctgcgcccggaaacgacgctggaacagttacgtgggttaaaagcaccatttcgtgccaatggggtgattaccgcaggcaatgcttccggggtgaatgacggagccgctgcgttgattattgccagtgaacagatggcagcagcgcaaggactgacaccgcgggcgcgtatcgtagccatggcaaccgccggggtggaaccgcgcctgatggggcttggtccggtgcctgcaactcgccgggtgctggaacgcgcagggctgagtattcacgatatggacgtgattgaactgaacgaagcgttcgcggcccaggcgttgggtgtactacgcgaattggggctgcctgatgatgccccacatgttaaccccaacggaggcgctatcgccttaggccatccgttgggaatgagtggtgcccgcctggcactggctgccagccatgagctgcatcggcgtaacggtcgttacgcattgtgcaccatgtgcatcggtgtcggtcagggcatcgccatgattctggagcgtgtttgagcatatcaacctgcgagtaccctacaatgataaccaatacaaagcttgacccgattgaaaccgcgtctgttgatgagttacaggcgttgcaaacacagcgtctgaaatggacgctcaaacacgcgtatgaaaatgtgccgatgtatcggcgcaaattcgacgcagcaggcgtacatcctgatgatttcagggaactttcagacctgcgtaaatttccctgtaccaccaaacaggatctgcgcgacaactatccctttgacacctttgccgtgccaatggaacaagtggtgcgcattcatgcttcttcgggaaccacaggtaaaccgacagttgtcggctatacgcaaaacgatattgataactgggccaatattgtagcgcgttctttgcgtgcggcagggggctcgcccaaagacaaaattcatgttgcctatggttacggcctgtttactggtgggctgggtgcgcactatggtgccgaacgtctgggcgctacggtgatcccgatgtctggcgggcagacggaaaaacaagcgcaactgatccgtgattttcaaccagatatgatcatggttacgccatcttattgccttaacctgattgaagagctggagcggcagttgggcggtgatgccagcggttgctcgctgcgggttggagtatttggtgctgagccgtggacacaggccatgcgtaaagagattgagcgtcgcctggggatcaccgcactggatatttatggcctgtcagaagtgatggggccgggggtggcgatggagtgtctggaaactaccgacggcccaaccatttgggaagatcatttctatcctgaaattgttaatcctcatgacggcacaccgcttgccgatggtgaacatggcgaactgttattcaccacgctgaccaaagaagcattgccggtcattcgttaccgcacgcgtgatttaacccgactgttaccaggaacggcgcggactatgcgccgcatggatcgcatcagcggacgcagcgatgacatgttgattattcgcggtgtaaatgtctttccgtcacaactggaagaagagattgtcaaattcgaacatttatcgccgcattaccaactggaggtgaaccgccgggggcatcttgattcactttctgtgaaagtggagttgaaagaaagtagcctgacattgacgcatgagcagcgttgccaggtatgccaccagctgcgccatcggattaagtcgatggtggggatctctaccgatgtgatgatcgttaactgtggcagtatcccgcgttcagaaggcaaggcgtgtcgggtgtttgatctgcgcaatattgttggtgcctgacgtatcgtctggccctggtggggtaaagcgccagggccagaagtcgatacgacctgtgctatgattcataaatcacaacaataacaacagactgaagcgaatgagtaaacttgatacttttatccaacatgctgtaaacgctgttccggtcagtggcacatctttgatctcctctctgtatggtgattcgctttcccatcgtggtggtgaaatctggttgggtagtctggctgctttgctggaagggctgggatttggtgagcgtttcgtgcgcaccgctttgtttcgtcttaataaagaaggctggctggatgtttcccgcatcgggcgacgcagtttctatagcctcagtgataaaggcttgcgcctgacgcgacgggcagaaagtaaaatttatcgcgcagagcaacctgcatgggatggtaaatggctcctgttgctctcggaaggtttagataaatcaacgctggctgatgtcaaaaagcagttgatctggcaaggttttggcgcactggcacccagcctgatggcatcgccgtcgcaaaaactggccgatgtacagacacttttgcatgaagcgggtgtggcggataacgtgatttgttttgaagcgcaaataccactggcgctttctcgcgcagcactgcgtgccagagtagaagagtgctggcatttaactgaacaaaatgccatgtacgaaacctttattcagtcattccgcccgctggtgccgcttttaaaagaggcggcagacgagttaaccccggagcgggcatttcatattcagcttttactgatccatttttatcgccgtgtcgtccttaaagacccattgttgccggaggagttgcttccggcacactgggcagggcatacggcgcgtcagctgtgtatcaacatttatcagcgcgtagcgcctgctgctttagcgttcgttagtgaaaaaggtgaaacctcggtcggtgaactgcctgcgccgggaagcctgtattttcaacgttttggcggcttgaatattgaacaggaggcgttatgccaatttatcagatagacggtctgactccggttgtgccagaagagagttttgtccatccgacagcggtattgatcggcgatgttattctcggcaagggcgtttacgttgggccaaatgccagcctgcgtggcgattttggtcgtatcgtggtgaaagatggcgcgaacattcaggataattgcgttatgcacggttttcccgagcaggatactgttgtaggagaagatggacatattggtcatagcgctatccttcacggctgcattatccgccgcaatgcattagtgggaatgaacgcggtagtgatggacggtgcggtgattggcgagaacagcattgttggtgcatccgcatttgtgaaagccaaagcagaaatgccagctaattacctgattgtcggcagcccggcgaaagcgattcgtgaactcagtgagcaggagttggcatggaaaaagcagggtacgcatgagtaccaggtgctggtgacacgctgtaagcagacgttacatcaagtcgagccattgcgggaaattgaacctggcaggaaacgcctggtatttgatgagaatctgcgaccgaaacagtaacagatgtaaaattattttgtccctttaattataaagcagagttatgtttaagctctgctttatttatttgagtattaattcataccgttttttcatcatataattatttataatgagaatgtggttttaatttgtaatttatattatatacacaatttatatatttcatggtctttttttattcacctgaattataattgtgaattataggaaagtatgtttgattagataataatctactggcaatattggatgtcttctatgttttaaataactaattggtcgggttagtgcatccggctttctttatattcgccagaaggatttattatgcaaaggaaaactctattgtcggcctgtattgcattagctctgagtggtcagggttgggcggcagatatcacagaggtagaaaccaccacaggtgaaaagaaaaataccaatgtgacttgtccggcagacccaggaaaactcagtccggaagagcttaaacgcttaccctctgaatgctctcctttagtcgaacaaaacctgatgccatggctttccacaggcgctgctgcgttaatcacggccttagccgtagtggaactaaacgacgatgatgatcatcatcatcgcaacaattctccactcccaccgacaccccctgatgatgaatcagacgacactccagttcccccaactcctggcggagatgagataataccggacgatccggatgatacgcctacacctcccaaaccggtttcgtttaataatgacgttattctcgataaaacagaaaaaacgttaactattcgcgattcagtttttacttataccgagaatgctgacgggactatatctctgcaagatagcaatggtcgtaaggcaacgattaatctttggcagattgatgaagcgaataacactgttgcccttgaaggggtgagcgcagatggcgcaacgaagtggcaatataatcacaacggtgagcttgttattacgggtgataatgccacagtaaacaacaatggcaaaaccaccgttgacggtaaagattccaccggtacggaaatcaacggtaataacgggaaagtgattcaggacggcgatctggatgtcagcggcggcggtcacggtattgatatcaccggtgacagcgcgacggtggataacaagggcaccatgaccgtcaccgatccggagtccatgggtatccagatcgacggtgacaaggccatcgtcaataacgaaggcgagagcaccatcaccaacggtggcaccggcacccagattaatggtgatgacgccacggcaaacaacaacggcaaaaccaccgttgacggcaaggattccaccggtacggaaatcaacggtaataacggaaaagttattcaggacggcgatctggatgtcagcggcggcggtcacggtattgatatcaccggcgacagcgcaacggtggataacaagggcaccatgaccgtcaccgatccggagtccatcggtatccaggttgacggcgaccaggcggttgttaacaacgaaggcgagagcgccatcaccaacggtggcaccggcacgcagattaacggtgatgacgccacggcaaacaacaacggcaaaaccaccgttgacggcaaggattccaccggtacggaaattgctggcaataacgggaaggtgattcaggacggcgatctggatgtcagcggcggcggtcacggtattgatatcaccggcgacagcgcaacggtggataacaagggcaccatgaccgtcaccgatccggagtccatcggtatccagattgacggcgaccaggccatcgtcaataacgaaggcgagagcactatcaccaatggcggcaccggcactcagatcaacggtaacgacgccaccgcgaataacagtggaaaaaccactgttgatggaaaagattccacgggtaccaaaatcgcgggcaatatcggcattgtaaatctggatggtagcctgactgttacaggcggtgcgcatggtgttgagaacattggtgacaacggcacggttaacaacaaaggagatattgttgtttccgatactggatcgattggcgtgctcatcaacggtgagggggcaacagtatccaatacgggtgatgttaacgttagcaatgaagcgacagggttcagcatcacaaccaacagtgggaaggtttcgctggcaggcagtatgcaggttggcgatttctcgaccggggtagatcttaatggcaacaataacagcgtgacgctggcggcaaaagatctaaaagtggtcgggcagaaagcgacgggcataaacgtttctggcgatgcgaatacagtgaatatcactggtaacgttctggttgataaggataaaaccgcagacaatgcggcggaatatttcttcgatccatccgtgggtatcaacgtttacggcagtgataataacgtgacgctggatggaaagttaactgttgtatcagacagtgaggttacttctcgtcagagtaatttatttgatggcagcgcagagaaaacgtcaggtctggttgtgattggcgatggcaataccgttaatatgaatggtggacttgaactgattggagagaaaaacgcgcttgcagatgggtcgcaggttacttccttgcgcacaggatatagttataccagcgttattgtcgttagtggtgagtcgtcggtatatctgaatggagatacgacaatcagcggagaattccctctggggtttgccggggttattcgggtacaggataaagctttgctggaaattggcagtggcgctacgctaacaatgcaggatattgacagttttgaacatcatgggacaagaaccctggatttgcccctatatttccagacatctgttatcacttaacccattacaagcccgctgccgcagatattcccgtggcgagcgataacccagcgcactatgcggatgccattcgttataatgctcgaacgcctctgcaaggttctttgctgccgttaacccgtctggtttgggcatgatactgatgtagtcacgctttatcgttttcacgaagctctctgctattccgttactctccggactccgcaccgccgtgttcttcggttcaagtcccaacatccgggcgaactggcgtgtttcattagcccggtagcatgaaccattatccgtcagccactccactggagacgacggaagatcgttgccgaagcggcgttccaccgctcccagcatgacgtcctgtactgtttcactgttgaagccgccggtagtgaccgcccagtgcagtgcctcacgatcacagcagtccagcgcgaacgtgacacgcagtctctctccgttatcacagcagaactcgaacccgtcagagcaccatcgctgattgctttctttcacggccactctgcctgtatgtgcccgtttcgatggcggtacagcaggttttcgctcaagcaacagcgcattctggcgcatgatccggtaaacacgtttggcattgatcgcaggcataccatcaagttctgcctgtctgcgaagcagcgcccatacccgacgataaccatacgttggcagctctccgataacatggtgtatacggagaagcacatccgtatcatcagtgtgacgactgcggcggccatccatccagtcatcggttcgtctgagaatgacgtgcaactgcgcacgcgacacccggagacaacggctgactaagcttactccccatccccgggcaataagggcgcgtgcgctatccacttttttgcccgtccatattcaacggcttctttgaggagttcattttccatcgttttcttgccgagcaggcgctggagttctttaatctgcttcatggcggcagcaagttcagaggcaggaacaacctgttctccggcggcgacagcagtaagacttccttcctggtattgcttacgccagagaaataactggctggctgctacaccatgttgccgggcaacgagggagaccgtcatccccggttcaaagctctgctgaacaattgcgatcttttcctgtgtggtacgccgtctgcgtttctccggccctaagacatcaatcatctgttctccaatgactagtctaaaaactagtattaagactatcacttatttaagtgatattggttgtctggagattcagggggccagtctaaaccccagaacttacttatgctgattccggtgcgaaaattgttaataaaggtacttgtagattcaattggtcaacgcaacagttatgtgaaaacatggggttgcggaggttttttgaatgagacgaacatttacagcagaggaaaaagcctctgtttttgaactatggaagaacggaacaggcttcagtgaaatagcgaatatcctgggttcaaaacccggaacgatcttcactatgttaagggatactggcggcataaaaccccatgagcgtaagcgggctgtagctcacctgacactgtctgagcgcgaggagatacgagctggtttgtcagccaaaatgagcattcgtgcgatagctactgcgctgaatcgcagtccttcgacgatctcacgtgaagttcagcgtaatcggggcagacgctattacaaagctgttgatgctaataaccgagccaacagaatggcgaaaaggccaaaaccgtgcttactggatcaaaatttaccattgcgaaagcttgttctggaaaagctggagatgaaatggtctccagagcaaatatcaggatggttaaggcgaacaaaaccacgtcaaaaaacgctgcgaatatcacctgagacaatttataaaacgctgtactttcgtagccgtgaagcgctacaccacctgaatatacagcatctgcgacggtcgcatagccttcgccatggcaggcgtcatacccgcaaaggcgaaagaggtacgattaacatagtgaacggaacaccaattcacgaacgttcccgaaatatcgataacagacgctctctagggcattgggagggcgatttagtctcaggtacaaaaaactctcatatagccacacttgtagaccgaaaatcacgttatacgatcatccttagactcaggggcaaagattctgtctcagtaaatcaggctcttaccgacaaattcctgagtttaccgtcagaactcagaaaatcactgacatgggacagaggaatggaactggccagacatctagaatttactgtcagcaccggcgttaaagtttacttctgcgatcctcagagtccttggcagcggggaacaaatgagaacacaaatgggctaattcggcagtactttcctaaaaagacatgtcttgcccaatatactcaacatgaactagatctggttgctgctcagctaaacaacagaccgagaaagacactgaagttcaaaacaccgaaagagataattgaaaggggtgttgcattgacagattgaatctacactgttgaaattcagaatttaggttttgcttttgttactggtgaaaatacaacaggtataaatagtggcacgatctcgttattacaaaatggtaaagatccggcaccgtctcccattgttttactggctactaacggagggagcgccactaatgcaggtacgatcacaggtaaagtgacggaacaacatagcgtatttaacaagtattcaacgggcacatcgaattcatttatttttaataacgatgtcagtagcataacagggttagtcgctcaatcgaatagcacaattatcaatactgacagcggcatcattgatttgtatggtcgtggtagtgtcggcatgcttgctatagcagattcaacagcagaaaatcagggtaaaattacactggattctatgtgggtagatgcaaatgacactaccgcaatgcgagatatagctagcaacagcgccattgacttcggtacaggtgtgggagttggtactgatagttatagtggtgcagggaaaaatgcaacagcaattaaccaattgggcggtgttataactatttataacgccggcgcaggtatggcggcctatggcgccagcaatacagttattaaccaggggacgattaacctcgaaaaaaatggtaattatgacgatagtctggcagcaaatactctggtagggatggctgtttatgagcatggtactgctatcaacgaccagacgggtgttatcaatatcaatgttggtactggtcaggcgttttataacgatggcacaggaacaattgttaactatggtacaatctgcactttcggcgtgtgccaatcggggaatgagtacaataatacagatgatttcacctcactgatctataccggtggcgatacgattacacgaagcggagaaactgtaacgctaaataaatctgctgctgtgactgataagctggctgggaatgttgttaatagcggaacgctttccggtgatcaaattacggtatcaagcggtcttctggaaaataccagcggtggcatcatcaataacttagtaaaacttgacaagggtgccgtcattaaaaatgccggggtgatgacgaataacgtcgatgttagcggtggaatcctcaataatgccggagaaatgactgcgcaaattaccatgaatgctggtgctgatagttcgttagtgaacaacaccggaaccatcaataaaatcgtgcagaacgcgggggtattcaataatagtggcagtgtaacagggcggatgatgtcggctggcggggtctttaataatcaaactgacggggcgattatgagaggtgctgcgctgacaggtactgcagtggcaaataacgaaggaacctggaacctcggaagtagtagtgagggtaacaacaccgggatgctggaagttaataataattcagctttcaataaccgcggcgagtttattcttgataacgacaagaatgctgtgcacatcaaccagtccggtacgctttataataccggtcacatgaacatcagtaattcttcccacaacggagccgttaatatgtggggcggaaatggtcgttttatcaatgacggaacgattgatgtttctgcgaagtcactggtagtcagcgctaataatgccggcgatcagaatgccttcttctggaaccaggataacggggtcatcaacttcgatcacgacagcgccagtgccgtgaaagtcacccacagcaactttattgcccagaatgacggcatcatgaacatcagcggcaccggtgctgtggctatggaaggtgataagaacgcgcagctggttaacaatggcaccatcaacctcggtaccgcaggcactactgacacgggtatgatcggtatgcaactcgatgccaacgccacggcggatgcggtaatcgaaaacaacggcaccatcaatatcttcgccaatgactcgtttgcatttagcgtactgggtacagtaggtcatgtggttaacaacggcacggtggtgattgccgatggggttacgggttctggactgatcaagcagggcgacagcatcaatgttgaaggtatgaacggtaacaacggtaatagcagcgaagtgcattatggcgactatacgttgccggatgtgccgaagcccaatacggttagtgtaacgtcgggaagtgatgaggctggtggcagcatgaacaacctcaacggctatgtcgtcggtaccaacgttaacggcagcgccgggaagctgaaggttaacaatgccagcatgaacggcgtggagattaacacgggctttaccgctggtacggcagacaccactgtgagttttgataacgtagtggaaggtagcaacctgaccgacgctgacgccatcacctcaacgtccgtggtatggactgccaaaggcagcaccgatgccagcggtaacgttgacgtcaccatgagcaaaaatgcctacaccgatgtggcaacagatgcctcggtgaatgacatcgcgaaagcactggatgcgggttacaccaacaacgaactgtttaccagcctgaacgtcggcacgactgctgaactgaacagtgctctgaaacaggtcagcggtagccaggcgaccacggtattccgcgaagcgcgcgtgttaagcaaccgctttagtatgctggcagatgccgcgccgaaagtgggtaacggtctggcgttcaacgttgtcgcgaaaggcgatccgcgtgccgagttaggtaataataccgaatacgacatgctggcattgcgtaaaactatcgacctgagcgaaagccagacgatgagtctggagtacggtatcgctcgtctcgatggtgatggtgcgcagaaagcgggtgataatggcgttacaggcggttatagccagttttttggcctgaaacatcagatgtcgttcgataacggcatgaactggaataacgccttgcgttacgacgttcacaaccttgacagcagccgctcgattgcatttggcaacacgaacaaaacggctgataccgacgtgaaacagcagtacctggagttccgcagcgaaggggcgaagactttcgaaccgagcgaaggactgaaggttacgccatatgcgggtgtaaaactgcgtcacacactggaaggtggctatcaggagcgcaatgccggagactttaacctgaatatgaacagtggcagcgaaacggcggtggacagcatcgtcgggctgaaactggactacgcaggtaaagacggctggagcgctagcgctacgctggaaggcgggccgaacctgagctacgcgaagagccagcgtacggcaagcctggcaggcgcaggcagtcagcactttaacgtcgatgacggtcagaagggcggcggcatcaatagcctgacaagcgtcggcgtgaagtacagcagcaaagaaagttcgctgaatctggatgcgtacaactggaaagaggatggcatcagcgataaaggcgtgatgctgaacttcaagaaaacgttctaatttttagcatgtgatccctaaaccgcaacgctgatacaggttgcggtttttttattgccggatgtggtacgtgacgcgttttgttttgtgtctttcaggacaatagagcaactcatccagtaatcttgtttacaccttcgcattatttatctcttttcgtttctatactgatttttcttaatccgttttattacagggcagggtgcgatgagcagcaatacatttactctcggtacaaaatccgttaaccgtcttggttatggcgcgatgcaactggcaggtcctggagtttttggccccccacgagatcgccacgtcgctataaccgtgctgcgtgaggcgctggcattgggcgtcaatcatattgataccagcgacttttatggtccgcacgtcaccaatcagattatccgcgaagcgctttatccttactctgacgacctgacaattgtcactaaaattggtgcgcggcgtggagaggacgcatcctggttgcccgcattttctccggcagagctgcaaaaagcggtgcacgataatctacgtaatctcgggctggacgtgctggatgtggttaacctgcgcgttatgatgggggatggtcatggcccagcggaaggatcgattgaggccagcctgaccgtgctggcagagatgcaacaacaaggcctggtaaaacatattggcctgagcaacgtcacaccgacgcaggttgcagaggcgcgcaagattgccgaaattgtctgtgtgcaaaacgaatacaacatcgcgcaccgtgctgatgatgcaatgattgatgctttggcccacgatggcattgcctacgtgccgttcttcccgctcgggggctttacaccgctgcaatcgtccacactttccgatgttgctgcgagcctgggtgcaacaccaatgcaggtggcgctggcgtggctgttacagcgttcaccgaatattttgctgatcccagggacgtcttcggttgcgcatttacgggagaatatggctgctgaaaaattgcatctttctgaggaagtgttgtctacgttggatggtatttcgcgagaataacgaatatacaaaagggaaagatgcatttccctttttttcttttttaatggcatggagtgcatatgttgaaggccaggaattgcggctggatacgtttactgcccctgtttatgctgagtctaccagtacaggcggaacttcgatgtgttgcaaatgcagttgatattgaatcatttttttctgcggctaccgctgaagataaacaacaagttgaacaagctatcaacagtagcgtgaatcttgtccccttcggtttatctgcatcgaactggaaagtgcatcgtggcgatttagtggtagaaggtaatatagagagtaatcaaaaattgattgttcttgggaatttgacagtcaaaggtaatatttccactttctctctttctaatccatgggttattctcggtaacgtgacggcaacgaatatagttgcggattcaccactgttaattaccggttcgataaatgcaagtggactggtatttatcgactcatattacgataatccgtctacgattaaggggagtattaatgcgcgtgggatatttatcaatgacataattgcacctgttgttgcgtcttcgacaaatagtgaattcatggtccgtgcgagtgacaaacatgacactgaaaatgtcaaaaaagcgctgatgataataaatcctgatgcatattattgggggctaattaatgatgaagatgctctgaaagaaatttttaagcgaagcaatattcgcatggcagggaatgtctgtaatcagatgaaaaaagaagcgctgtttcgccctaagccttctcctgagttagtgcaagaattgcaaatgctggatgaaggcaaagttgctgcatttgaaggacgagacattgcgacatttgatcttgccgtaatgcgaactctcccaaggcttaaaggaatttcagctaacctacgcaaacaacttattaatagcaatgatgaacaaacgattgaaagtatggcgagatatatgcctgacaatgagattctggagttgaccgatcagcaattgggttaccagcctgttgttctggggttgctcgaccgtgaaccgctctctgtcgaaataatgacgcgaatgagtcgtctacctgatggtgtcggtccgttgaatcttgcgctacgtgaaaatctccctctggatatcgtcatgactctggcgaaaagagattgggatatgatcattcaggagctttataaagatgcgtggttattgcctgaatccattattgatggctatatccgcagtgatgattcctctattcgtcaggtcggtgctggaggacaactcacctacaatcaggcaatgcagttggcgaacgattcatcaaacaatgttgtcacaagcttagcgttcaagctggcagagatgaaacaccatggtcaattgttgcggatgacgccacaagagagtgacaaagttgcaggctatttataccaaaaattcgagaatgacgatgatctaatacgtgtgttatttttagcattgccagataacttacagtttaattttgttaaaaggatggagaaaaaatccccggcctacttttgctgtcgggatatgcaggtaattcactctgacgctgctttacaacggttattgacacgtttcaacgatcctgaagggtggagtaatctggcgaaaaatcagtatctgagcacgtcgatgaaacaaaaaatttggcaacgtgctttatcgcatcggaaaaataatccgaaagcagattcagatgcatatgaaaccagcgctgatatgattttgtctgagctgattagccacggcgaagttgatgaccagatgctattaaatgccaccgccctgatacgttcggacgactgggactttttagagagtgcattaattagttgggataatttacccgctgttgttctcaaggaattacagcaaaacacgccacgcaatgatatttgggcgaagttttttctgaggcaggaaaacagttcccgtgcgcaggttgacgaagcgttacgtgtttattatgcactagaccccgatgcgttagcacaactggatgtactggcaaaacaaccggatcgtatatggtggagtacactggcgaaaagcaatctcacatttttcaagttcggcgcacttaacaaccgccacacaccgcctgcagtactggcggcagaaattgatcccgagtggtggattgtggcgatgaataatccccgttttccagttgatgtattaaaggcgaggctgaaacgtgatcctttgctggcgttagagcttgttaaccctgaactggatttagtccgccagctggcgcttaacggtaagacgcgcgcaatacgggaacaagcgatgagaaaacttgatgagttgtattgatccacaacgtaatgttttttaactatctgattaattggggataatcattcctgacagtgagtccccaataccttgatatattctgaatttttaatgaaacggcgtgttgcgatatctccgtcaggggaattgatgcaccatagcgcaaaccgaattatcaaggattgataatgacgctctaccagataaaaccgctctttcagtcgctgttaaggccgacgatgttttggctttataagcaccacgttacagcgaatcacatcactcttgctgcactggcgctttctcttcttaccggattgctgttgatgttggcggcacaacccatcctctttttgctattgcccatcgtgctttttatccgtatggcgctcaatgcgctggatggcatgttggcgcgtgagtgcaaccagcaaacacgtctgggggcgattttgaatgagactggcgatgttatttccgatattgcgctctatttaccatttttatttttaccggaaagtaacgcatcactcgtgatactcatgttattttgcaccatattgaccgagttttgcggtttactcgcgcagacgattaacggtgttcgcagttatgccggtccatttggcaaaagcgatcgcgcgttaatatttggtctgtggggtctggccgttgccatttatccacagtggatgcagtggaataatcttttatggagcattgcttcaattctgcttctctggactgcgattaatcgttgtcggagtgtgcttcttatgagcgctgaaatataatgctggaaaaatctctggcaacacttttcgcgttgttaattttagcaacgctgataaaccgttttctgctatggcggttaccggagagaaaagggggtgaggttacattacgtattcgtacctggtggggcatcgtcatttgtttttcaatggtgatttcaggtccacgctggatgacgttgacgttttttgcgctgataagttttctggcattgaaagaatattgtacgcttatatctgtacattttccgcgttggttatattggggtattcctcttaactatttgcttatcggttttaattgctttgagctgtttctgttatttatacctttggctgggtttctgatattagccaccgggcaagttttagtgggtgacccctctggttttctgcataccgtgagcgccattttttggggctggataatgaccgttttcgccttgagtcatgccgcctggttattaatgttgccaaccacaaatatccagggcggggcgttactggtgttatttcttttggcattaaccgagtcaaacgatattgcacagtatttatggggaaaatcctgcggcagaagaaaagtggtccctaaagtcagcccgggaaaaacattggaaggtctgatgggcggcgtcatcaccatcatgattgcgtcactgattatcggaccgttactgacaccgctaaatacattacaggcattattagcgggtttgttaattggtattagtggtttttgcggcgatgtcgtgatgtcagccatcaaacgagatattggtgttaaagatagcggaaaactattgccaggacatggcggactccttgacaggattgactcattaattttcaccgctccggtatttttttattttatacgctactgctgttactgaaggaaaatagagaaaatggaaaattcacgcatccctggggaacatttttttaccaccagtgataatacagcgttgttttatcggcactggcccgctttacagcccggggcgaaaaaggtcatcgtcttatttcatcgcgggcatgaacattctggtcgtctacaacatctcgttgatgaactggcgatgccagatactgctttttatgcctgggatgcccgagggcatggaaaaagttcggggccgcgtggttatagcccatctcttgcgcgttcagtgcgggatgtcgatgaatttgtccgttttgctgccagcgacagccaggttggactggaagaggtggtagtgatcgcgcaaagcgtcggcgcagtgctggttgccacatggattcatgattatgcacctgcaattcgcgggctggtgctggcttctccggcctttaaggttaaattgtatgtgccgctggcacgtcctgcgctggcgttatggcatcgtctgcgtggtctgttttttattaattcctatgtgaaaggacgctatttgacccacgatcggcaacggggggcgagtttcaataatgatccgctgatcacacgggcgattgccgttaatatcttgctcgatctctacaaaacgtctgaacgtattattagagatgcggcggcgattacgctccccacgcaacttctgatatcaggcgatgactatgtggtgcatcgccaaccgcagattgatttttatcagagattacgtagccctctgaaagagctgcatctgctgccaggcttttatcacgacacgttgggtgaagagaacagggcgctggcatttgaaaaaatgcaaagctttattagtcgtttatatgctaacaaatcgcaaaaatttgattatcagcatgaagactgcacaggaccatcagcggatcgatggcggctactttctggtggacccgtgccattatcgccggttgatttagcgtatcgctttatgcgaaaggcgatgaaattgttcgggacgcactcttcgggcctgcatctcggaatgagcaccggctttgattcaggcagttcgctggattatgtctatcaaaatcaaccgcaaggtagtaacgcattcgggcgtttagtcgacaaaatctacctgaacagtgttggctggcgcggtattcgccagcgcaaaacccatttacaaatactgattaaacaagccgttgccgatctccacgccaaaggtttagccgtccgcgtggttgacattgccgcagggcatgggcgctatgtactggatgcgctggcaaacgagcctgccgtaagcgatattttgttacgtgattacagcgagttaaatgttgcacaggggcaagagatgattgctcaacggggaatgtctgggcgggtgcgttttgaacagggcgatgcgtttaacccggaggaactcagcgcgttaactccgcggcctacgctggcgattgtctctggcctgtatgagctttttcccgaaaatgagcaggtaaaaaactcactcgcaggtcttgccaatgccatcgaaccgggcggcattctcatctacaccgggcagccgtggcaccctcaactggagatgattgccggggtgttaaccagtcataaagatggtaaaccgtgggtaatgcgcgtgcgttcgcaaggggagatggattcactcgtgcgtgatgccggatttgataaatgcacacaacggattgatgagtggggtatttttacggtttcgatggcggtgcgtcgtgataactgaacgtcggaacgtattgctacaaggcgctggctggttattgttgctggccccgtttttcttcttcacctatggatctcttaatcagttcaccgcggttcaggaccttaacagccatgatatccccagtcaggtattcggttgggaaacggcgatcccttttcttccctggactattgttccttactggagtctggatcttttatatggattttcgctgttcgtttgtagcacgacattcgaacagcgccgacttgtccaccggcttattctggcaacggtaatggcctgctgcggttttttgctctatccgctgaagtttagttttatccgtcctgaagtgagtggggtgacgggatggctattttcgcaacttgaactgtttgatctgccttataaccagtctccttcgctgcatattattctctgctggctactttggcgtcactttcgtcagcatctggctgagaggtggcgtaaagtctgcggcggatggtttttactcatcgccatttcgacgctgacgacctggcagcatcattttattgatgtcatcacagggctggcggtaggtatgttgattgactggatggtgcccgtcgaccgtcgttggaattatcagaaacctgatcaacgtcgaatcaaaatagcactgccctatgtcgtaggcgcgggctcgtgcattgtattgatggagctaatgatgatgattcagttatggtggtcagtctggttatgttggccagtattatcgctactcataattggccgtgggtacggtgggcttggcgcgataacaacagggaaagatagtcaggggaaactaccgcccgccgtttactggctgacattgccctgccgcatcgggatgtggctgtctatgcgttggttttgtcgtcgcctggagccggtgagcaaaatgactgctggtgtttatttaggggcgtttccacgacatattccggcacagaatgcggttctggacgtcacctttgaattccctcgcggacgagccacaaaagatcgactctatttttgtgtaccgatgctggatctggtggttccggaagagggggagctccgacaggccgtggcgatgctggaaacattacgcgaagagcaaggcagcgttctggtccattgtgcattgggattatcgcgcagtgcgctggtggtggcggcatggttgttatgttacggacactgtaaaaccgttaatgaagcgattagctatattcgagccagacgcccgcagattgtgctgacagacgagcacaaagcgatgctgagattatgggaaaacaggtaagtggattgagatgtggactgaatatctacagtccacatcaagaccgtgtccggttatgcagaaacaatgctgtcgatggctgcttttgcgtcagactgtgctttcgctgccatttccggaccgtatgcgatcccttcggcgaagacaaatttcacatcggtaatgccgataaagccgaggaacgtggacagatacggcgtcaccaggtccgttggtccatctttgtggatcccgccgcggctggtaataacgatggcttttttacccgttaccagaccttccggaccgttctcggtatagcggaaagtaacgcctgcgcgggcaaccaggtcaaaatagtttttcaactgagtcgagatgttgaagttatacatcggtgccgcaataacgataacgtcgtgggctttcagctcggcaatcaactcatcggaaagtgccagagcttcctgctgacgcggagtcagcggcgcatcgctcggacgcagagcgccaaccagttcgccatccagtaccggaatcggatttgcagccaggtcgcgaacggtgatttcatcagcggagtgcttttcgcgccattgttcaacaaaataatcggacaactgattagactgagagtaccctgccaggatgctggatttaagaactaataccttgctcatggtgtttccttatagatgtttgaatgggcgatgccccgttgcttgttgacactttattcacaatcctgccacagagatagcgcaataaatcgaagcctatgttcgaatttattgaacaacgcatagaaagccgcgatgtggtactctatatctatcatttaaaagaaaattaatcaggcagactactgcccactaacgttatgacagaacaacaaaaattgacctttacggccttgcagcagcggctggattcgctgatgctgcgtgacagactgcgtttttctcgccgtctgcacggcgtgaagaaggttaaaaatcctgatgcacaacaggccattttccaggagatggcgaaagagattgaccaggcggcagggaaagtcctgctgcgtgaagcggcacgaccggaaattacttatcctgacaatttaccggttagtcagaaaaaacaggacattctcgaagcgattcgtgatcaccaggtggtgatcgtcgccggggaaacgggttctggtaaaacgactcagttaccgaaaatctgtatggagctggggcgcgggattaaaggactgatcggccatacccagccgcgtcgtctggcggcaagaacagtggcgaaccgtattgcggaagagctgaaaacggagccgggcggttgcatcggttacaaagtgcgtttcagcgatcacgtaagtgataacacgatggtcaagctgatgaccgacggtatcctgctggcggagatccagcaagaccgcctgctgatgcagtacgacactatcattattgacgaagcgcacgaacgcagcctgaatatcgattttttgctcggctatttgaaagagttgctgccgcggcgtcctgacctaaaaatcattatcacttccgcgactatcgacccggaacgcttttcgcgccactttaataatgcgccgattattgaagtctccggtcggacctatccggtggaagtgcgctatcgcccgattgttgaagaagccgatgacaccgagcgcgatcagttgcaggcgatttttgacgccgtagacgaactgagtcaggaaagccatggcgacattctgatctttatgagcggcgagcgggaaatccgcgataccgccgatgcgctgaacaagctgaacttacgccataccgaaatcttgccgctttatgcgcggctttcgaacagcgaacaaaatagggtattccagtcgcacagcggacggcgcattgtgctggcgaccaacgtcgcggaaacgtcgctgaccgtaccggggattaaatacgttatcgaccccggtacagcgcgtatcagccgctacagctatcgcaccaaagtgcagcgtttgccgattgagccgatttcccaggcgtctgccaatcagcgtaaaggccgctgtggtcgtgtgtccgaagggatctgtattcgtctctattccgaagacgatttcctctcgcgcccggagtttaccgatccggagattctgcgtaccaacctggcctcggttattttgcagatgaccgcgctggggctgggcgatatcgctgcgttcccgtttgtcgaagcaccggataaacgcaatatccaggatggcgtgcgtctgctcgaagagctgggcgcgatcaccactgatgaacaggccagcgcctataaactgacgccgctcggtcgccagctctcgcagttgcctgtcgacccacgtctggcgcgtatggtgctggaagcgcaaaaacatggctgcgtgcgtgaggcgatgattatcacgtccgcgctctccattcaggatccgcgcgaacgtccgatggacaaacagcaggcatcggacgaaaaacatcgtcgcttccacgacaaagagtctgactttctcgcgtttgtgaatctgtggaattatcttggcgagcagcaaaaggcgctttcttccaacgccttccgtcgcctgtgtcgtaccgattatctcaactatctgcgcgtgcgcgaatggcaggatatctacacccagttgcgtcaggtggtgaaagaacttggcattccggttaacagcgaaccggcggagtatcgcgaaattcacattgcgttgctgaccggtttactttcccatatcggcatgaaagatgccgataaacaagaatataccggcgcacgtaacgcgcgtttctccatcttccccggttctggtttattcaaaaaaccgcctaaatgggtaatggtggcggaactggtagaaaccagccgcctgtgggggcgcattgctgcgcgtatcgacccggaatgggtggagccagttgctcagcatttgattaaacgcacctacagcgaaccgcactgggaacgggcgcagggcgcggtgatggcaacggaaaaagtcactgtttatggtttgccgattgttgccgcgcgcaaggtcaactacagccagatcgatccggcgttatgtcgtgaactctttattcgccacgcgctggtggaaggtgactggcagacgcgtcacgcattcttccgtgaaaacctgaaactacgggcggaagtagaagagctggaacacaaatcacgtcgccgcgatattctggttgatgacgaaacgttgtttgagttctacgaccagcgcatcagccacgatgtaatctccgctcgccacttcgacagctggtggaaaaaagtcagccgcgaaacgcctgatttgctcaactttgaaaaaagcatgttgatcaaagagggcgcagaaaaaatcagcaagctggattacccgaacttctggcatcagggcaatctcaagctgcgtttgagctatcagtttgagcccggcgcggatgctgacggtgtgaccgtacatattccgctgccgttacttaaccaggttgaggaaagcgggtttgaatggcagatccccggtctgcgccgcgaactggtgattgctctgattaaatcgttgccgaaaccggtacgccgtaattttgtacccgcgccaaactatgccgaagcgtttttaggccgcgtcaaaccgctggagttaccgttgctcgacagccttgagcgcgagttacggcggatgaccggcgttaccgttgaccgcgaagactggcactgggatcaggtgcccgatcacctgaaaattaccttccgcgtggtggatgacaaaaacaagaagctaaaagaagggcgctcgctacaagatctgaaagatgcgctgaaaggcaaagtgcaggaaacgctatctgcggtggcggatgacggtatcgagcagagcggcttacatatctggagttttggtcagctgccggaaagctacgaacagaagcgtggcaactacaaagtgaaggcgtggccggcgctggtggatgagcgcgacagtgtggcgatcaaactgtttgataacccgctggagcaaaagcaggcaatgtggaacggtcttcgccgtctactgctgctgaatattccatcgccaatcaaatatttacatgaaaagttaccgaacaaagccaagctgggactgtactttaacccgtatggcaaagtgctggagctgatcgacgactgtatctcctgcggtgtggataaattgatcgacgccaatggtggcccggtctggacggaagaaggctttgctgcgctgcatgaaaaagtgcgtgccgaactgaacgacacggtggtggatattgcgaagcaggtcgagcaaatccttacggcagtgttcaatatcaacaaacgtctgaaagggcgggtggatatgaccatggcgctggggctttctgacattaaagcgcagatgggcgggttggtatatcgcggttttgtcactggtaacggcttcaaacggctgggcgacacgctgcgatatttgcaggcgattgaaaaacggctggaaaaactggcggttgatccacatcgcgaccgtgcgcagatgctgaaagtcgaaaacgtccagcaggcgtggcagcaatggatcaacaaactgccgcccgcacgtcgtgaggatgaagacgtgaaagagatccgttggatgatagaagagttgcgcgttagttacttcgctcaacaacttggtacgccttatccgatttcagataagcgtattttgcaggcgatggagcagattagcggttaaccctgctatttgcctgataaagaaaaaacccggtaagcatttagcgccgggttttttattaattctaaaacggtaagggtaaaaattcaggaattcagaaaaatacaattctctgctgcaagatgaataatgtttatctacagcatttccttaaaagatatgtcaggcttgcggagtggcggttaaggacatacgatttcctcctttcagagtgctccgcttctcactattatctcacgcagtattcttaagggaacgataaggaggaaccatgaacattaccccgtttccgacgctttcgccggcaactatagatgccataaatgttatcggacagtggctggcgcaggatgatttctccggtgaggtgccgtatcaggccgattgcgtgatccttgcaggcaatgcggttatgccgactatcgatgcggcatgtaagattgcccgcgatcagcaaattcctttactgattagtggtggtatcggtcactcgacaacttttttgtatagcgccatcgcacagcatccgcactacaacactatccgcaccactggcagagcagaagcgaccatcctggcggatatcgctcatcagttctggcacattccgcatgaaaaaatctggattgaagaccagtcaacaaactgcggtgaaaacgcacgctttagcatcgcgctattgaatcaggccgtagaacgagttcatacggctatcgttgttcaggaccccaccatgcagcggcgcacgatggcgacgttccgccgtatgactggggacaatcccgatgcaccacgctggttaagttatcccggattcgttcctcagttaggaaataacgcagacagtgtaatctttattaatcagttacaaggattatggccagttgagcgttatctctcactactcactggcgagctgccgcgtttacgcgatgatagcgatggctacggtccccgcgggcgagattttatcgttcacgttgattttccggcagaagtcatccatgcatggcaaacgctgaaacatgatgcggtgctcatcgaggcgatggaaagtcgctcgttacgttaaaaattgcccgtttgtgaaccacttgtttgcaaacgggcatgactcctgacttttatttctgccttttattccttttacacttgtttttatgaagcccttcacagaattgtcctttcacgattccgtctctctgatgattgatgttaattaacaatgtattcaccgaaaacaaacatataaatcacaggagtcgcccatgtcagtacccgttcaacatcctatgtatatcgatggacagtttgttacctggcgtggagacgcatggattgatgtggtaaaccctgctacagaggctgtcatttcccgcatacccgatggtcaggccgaggatgcccgtaaggcaatcgatgcagcagaacgtgcacaaccagaatgggaagcgttgcctgctattgaacgcgccagttggttgcgcaaaatctccgccgggatccgcgaacgcgccagtgaaatcagtgcgctgattgttgaagaagggggcaagatccagcagctggctgaagtcgaagtggcttttactgccgactatatcgattacatggcggagtgggcacggcgttacgagggcgagattattcaaagcgatcgtccaggagaaaatattcttttgtttaaacgtgcgcttggtgtgactaccggcattctgccgtggaacttcccgttcttcctcattgcccgcaaaatggctcccgctcttttgaccggtaataccatcgtcattaaacctagtgaatttacgccaaacaatgcgattgcattcgccaaaatcgtcgatgaaataggccttccgcgcggcgtgtttaaccttgtactggggcgtggtgaaaccgttgggcaagaactggcgggtaacccaaaggtcgcaatggtcagtatgacaggcagcgtctctgcaggtgagaagatcatggcgactgcggcgaaaaacatcaccaaagtgtgtctggaattggggggtaaagcaccagctatcgtaatggacgatgccgatcttgaactggcagtcaaagccatcgttgattcacgcgtcattaatagtgggcaagtgtgtaactgtgcagaacgtgtttatgtacagaaaggcatttatgatcagttcgtcaatcggctgggtgaagcgatgcaggcggttcaatttggtaaccccgctgaacgcaacgacattgcgatggggccgttgattaacgccgcggcgctggaaagggtcgagcaaaaagtggcgcgcgcagtagaagaaggggcgagagtggcgttcggtggcaaagcggtagaggggaaaggatattattatccgccgacattgctgctggatgttcgccaggaaatgtcgattatgcatgaggaaacctttggcccggtgctgccagttgtcgcatttgacacgctggaagatgctatctcaatggctaatgacagtgattacggcctgacctcatcaatctatacccaaaatctgaacgtcgcgatgaaagccattaaagggctgaagtttggtgaaacttacatcaaccgtgaaaacttcgaagctatgcaaggcttccacgccggatggcgtaaatccggtattggcggcgcagatggtaaacatggcttgcatgaatatctgcagacccaggtggtttatttacagtcttaatgagtgaaagaggcggaggttttttcctccgcctgtgcgcgtcagagtttagcgaatttttcgagggtgcgaataagctgtgtgacgaagccatattcgttatcgtaccaggcgaccgttttcaccagttgtaaatcgcccacggcggtaatttccgtttgcgtggcatcaaacaccgaaccgaaatggctgccaatgatatcggaagagactatttcttcatcggtataaccaaatgactcgttattggtggttgcttgtttaagtgcgttattcacctcttcggcagtcacttttttccgagaatcgataccagttcagtgaccgaacctgttttcaccggcacgcgttgcgcatgacctttcagtttgccgctcagttccgggatcaccagaccaatggcttttgccgcccccgtagtgtggggaatgatattttctgccgctgcgcgtgaagcacgtaaatctttaccacgcgggccatccaccagtgactgggtgccagtataggcatgaatggtcgtcatcgtgccgacttctatcccgaaactgtcatgcaaggctttggccatcggcgcaagacagttagtggtgcatgacgccacggaaacaatggtgtcgttgccatccagagtgtcgtcattgacgttataaacgatagttttcatttcaccggcaggggcggaaatcaacaccttcttcgcaccagcatcaagatgcgcctgcgatttctcggcggaggtataaaagccagtacattcgacaatgatttctgcacctttcgctttccacggaatatttttagcctctttttcggcgtaaaccgcgatacttttcccatcaacgataagtgaatcttccgtaaaatcaacgctccaggggaatggtccgtagtttgaatcatgtttcagcaggtaggcgagaatttatggggaagtgagatcattaatagcgacaacgtctatgttgcttttgacttcaagtaatcgacccaacaccagtcgaccgatacgaccaaaaccgttaataccaactttactcatggttttctcctgtcaggaacgttcggatgaaaattgatcctttccaagcttagaccaggatggcgggatgggcaatctccattctcacagtgaaacgtaacgtactgaaaacgggtgaacaatatttaatgaaattttgagaaaagcccgttatgttaacggaaaattatgttaaagcaggaaatgttatggaaaataaatattcaaggttacaaatcagcattcactggctggtctttttactggttatcgcagcgtattgcgcaatggagtttcgtggtttcttcccacgtagcgatcggccactcatcaacatgattcatgtttcctgtggcatctcaattctcgtgctgatggtcgttcgtcttttgttaaggctgaaatacccaaccccgccgattatacctaagccaaaaccgatgatgacgggactggcgcatttgggacatttggtgatttatctcctgtttattgcgctgccagtgattggtttggtgatgatgtataaccggggcaacccgtggtttgcgtttggtttgacgatgccttacgcttcagaggccaatttcgaacgggtagatagcttaaagtcgtggcatgaaacgctggcgaatctgggatattttgtcatcgggttgcacgctgcggctgcactggcacaccactatttctggaaggacaacacacttctacgcatgatgccgcgtaaacgttcctgaaggatatttaaagaaaacgcctgtactaaaaccgacccgtggtacaggcgaagaatacgggtctacatcggaagcgcctattatatttatttgtatgataaataaaaccataatccttgcccatacgtccatctggcttatttttaatcaattcacccgatctttgatctcatcaacggtatcaaaataaaccagcgtataacgttcaaatcgaacataagattcgataaaccatggaggttatatgaaaaaactggcacttattttgtttatgggaacgcttgtttccttttatgccgatgccgggcgcaaaccctgttctggttcgaaaggggggatctcacactgtacggcaggcggcaaatttgtctgtaatgatggttctattagtgcatcgaaaaaaacatgcactaactgaagtgtaaaaggggtgccatgagaaaatgaatctgctagtcaaatgcgcggggaaaatccccgcgcttgcccttacctggacgtgcaggccatgagcgcagcaacctccttatcaccgtcccggaaccgcagttcgtagagcgtttgtcgggtcaggagtgtgaatgtcagaatcgtaatgcagataatgagcagacacaccaccagagggttgtgcttcatagcctttctccttgccggatggcgggtaagaggctaagatctgaattgctaggttcattcgttggcctcggttgatagaaatatcggtcggggccttcgtctttctgattcccggttagcctgaaaacagaaagtctcaggcacccgcaggcatcctatgaggtttccttagggacgaaaataatcacttcacgaaattgcgtgctgttttccagaatttttcgtcattcgggttagccagtttagccattcgttactctcttcattccaatagcattaattttctatgcaataattgttgtaaaaatgtgacgcaaagaggtttttggtcataagtaattaccgtcaagtgccgatgactttctatcaggagtaaacctggacgagagacaacggtaatgaatacaactccctcacagcgattaggttttttgcatcacatcaggttggttccgttatttgcctgcattctaggcggtatcttagttctattcgcattaagttcagccctggctggctatttcctctggcaggccgatcgcgatcagcgtgatgttactgcggagattgagattcggaccgggttagcgaacagttcagattttttgcgttcagcccggatcaatatgattcaggccggggctgcgagtcgtattgcggaaatggaagcaatgaagcgaaatattgcgcaagccgaatcggagattaaacagtcgcagcaaggttatcgtgcttatcagaatcgaccggtgaaaacacctgctgatgaagccctcgacactgaattaaatcaacgctttcaggcttatatcacgggtatgcaacctatgttgaaatatgccaaaaatggcatgtttgaagcgattatcaatcatgaaagtgagcagatccgaccgctggataatgcttataccgatattttgaacaaagccgttaagatacgtagcaccagagccaaccaactggcggaactggcccatcagcgcacccgcctgggtgggatgttcatgattggcgcgtttgtgcttgccctggtcatgacgctgataacatttatggtgctacgtcggatcgtcattcgtccactgcaacatgccgcacaacggattgaaaaaatcgccagtggcgatctgacgatgaatgatgaaccggcgggtcgtaatgaaatcggtcgcttaagtcgtcatttacagcaaatgcagcattcactggggatgacagtagggactgttcgacagggcgcggaagagatttatcgtggcaccagcgaaatttcagctggcaatgcggacctgtcatctcgcaccgaagaacaagcggcggctatcgaacaaactgccgccagcatggagcaactcactgcgacggtgaaacagaatgcggataacgcgcatcatgccagcaaactggcgcaagaggcttctattaaagccagcgatggcgggcagacggtttccggtgtagtaaaaacgatgggcgctatctccacgagttcgaagaaaatttctgagatcaccgccgtcatcaacagtattgctttccagacgaatattctggcactgaatgctgccgttgaagccgcgcgagcgggtgagcaagggcgtggatttgccgttgtcgccagcgaagtacggacactcgcaagtcgcagcgctcaggcggcgaaagagattgaaggcttgatcagtgaatcagtcaggttaattgacctggggtcggatgaggtggcaacggccgggaaaaccatgagcactattgttgatgccgtcgcgagtgtcacacatatcatgcaggaaatcgccgccgcctcggatgaacaaagtagaggcataacgcaggttagccaggcgatttctgaaatggataaggtgacgcaacagaatgcttctctggtagaagaggcctcagcggcggcggtgtcccttgaagaacaggcggcacgattaactgaggcggtggatgtattccgtctgcacaaacattctgtgtcggcagaacctcgcggagcgggtgaaccagttagtttcgctacggtgtgaaaatgttcaaggagggatcgacagatcccttcacctttcagaacggcattgattttcgaatagcgttaatcatcaactggcaaccagaagagaacgtcgcatctacgcgggtcagtattccaatcggttcgcctgcaccatgtcccggaacaggcagggccaccagcgtggcatgacgcaggtcgtcttttacagcgccagaagggacaaaccacacgtaatcgtattcaaccgtaagttgacgagatagcgaagcagacagcgtttcgatacaacccgaaggaattttacagccctggctctgcactaatgcatctgaatgctggcgtggcgcagtgccttctggtgatacaacgaccggccattccagcacccggcttagcgttacgttctcctgaagtagcgggtgattagggcggacaaccagcttcaacgattcaagaaacagcagttcgtaattaagcccggtcatcagttcaggatctgacatccgaccaatgccgatatcgatttccccggtttttaaacccgccagaatcatagggttactcattgtcgcaacttgcaaggtcgtctctttttgttgctgatgaaactgacctataaccgaaggtaatatccccagtgccgcagtaggtagtgcaccaaccctgacgacatcattattaagaccttctttacgatgaagcgaccgtccggcagtgttgatggcgtcaagaactctgactgcatgcgttaaaaattgttcgccgggtaaggtaagttgcgccccctgacgaccacgctcaaacaagcgagcgccagtcagctgctccagttcattcaatgtcttagagagcgcaggttgactcaaattaagggtttcagccgcgcgccccaaagttccttgttgtgcgacagctacgaatgtatgaaggtggcgcaaacggatgcgctgactaaacagactatttttttccataagcgatgttaaaaacgaagcggtgtcgctgacaagtgaagttgtttgattatgataacttgattgcaaaatattattaacaattaaagcaattatgttacagcaaaatggataatattgatgttttcgcggcgagatcacagtttgtaaattcttcccgcaagagtgaatgcggttacctacactccagattactgaccactggaggcagacactatggcgaacagcatcacggcggatgagattcgggaacagttttcgcaggcaatgtcagccatgtaccagcaagaagttccgcaatatggcacgctgctggaactggtagctgatgtgaatctggctgtgctggaaaacaatcctcaactgcacgaaaaaatggtaaatgcagacgagctggcgcgactgaatgttgaacgtcatggggcgattcgcgttgggactgcacaagagcttgctactcttcggcggatgtttgccattatggggatgtacccggtgagctattacgatctctcgcaggcaggggtgccggtacattcgacagcatttcggcccattgatgatgcttctctggcgcgtaatcccttccgcgtttttacctccttactccgccttgagcttatcgagaacgaaattttgcgccagaaagcggcggagattctgcgtcagcgcgatatcttcaccccacgttgtcgacaactgttagaggaatatgagcagcagggcggttttaacgaaacacaggcacaggagtttgtgcaggaagccctggaaacgtttcgctggcaccagtcagcaacggtagatgaagaaacctatcgcgcattgcacaacgaacatcggttgattgctgatgtggtctgttttcctggatgccatatcaaccacctgacgccacgtacgctggatattgaccgggtgcagtcgatgatgcctgaatgcggaattgaacccaaaattctcatcgaggggccgccgcgccgcgaggtaccgattttactacgccagaccagctttaaagcactggaagagacggtgttgtttgcggggcagaaacagggcacgcataccgcgcgctttggtgaaattgagcagcgtggcgtggcattaacgccgaaagggcgacaactgtatgatgatcttctgcgtaacgctggaaccgggcaggataatctcactcaccaaatgcatttacaggaaaccttccgcacttttcctgacagtgagtttttaatgcgtcagcaagggttggcatggttccggtaccgtctgacgccttcgggtgaggcgcatcgtcaggcgattcatcctggagacgatccacagcccttaattgaacgtggttgggtagtggcgcaacccatcacctatgaagatttcttgcccgttagcgcggcggggatcttccagtcaaatctgggtaatgaaacgcagacacgcagtcacggtaatgccagtcgcgaagcatttgagcaggcgttgggttgtccggttttggatgagttccagctttaccaggaagcggaagaacgcagtaaacgtcgctgtggtttgctttaaaatctgaccatccgcctttgcaaaaatttgcctgattttacaaacgaatcaggctcatcccatcgacataaaaaaaatgccgatttatgcatattctctcagttcaacaattggattattaataaatattgtctagagtgagcggtcataaataagcactttcttgccgctgaaaacgaccagcgcgggaccattcacaacaccagaaggactcactttcaggtatggatcgtagacgatttattaaaggttcaatggctatggccgccgtgtgcggtaccagcggcattgcttctcttttttctcaggcggcattcgcggcagattctgatattgccgacgggcaaacccagcgttttgacttctccattctacagtcaatggcgcacgacttagcgcaaacagcgtggcgtggtgcgcctcgtccgttacctgacacgctggcgacaatgacgccgcaggcttataacagtattcaatacgacgccgaaaaatcgctctggcataacgttgagaaccgtcaactggacgctcagttcttccatatgggaatgggattccgtcgccgcgttcgtatgttttctgtagatccagcaacacatctggcgcgtgaaattcactttcgcccggagttgttcaaatacaacgatgcaggtgttgatacaaaacaattagaagggcaaagcgatctcggctttgccggttttcgcgtgtttaaagcccccgaactggcgcgccgtgatgtagtatcatttctcggcgcgagttatttccgcgccgttgatgatacatatcaatacggtttgtcggcccgcggcctggcgatcgacacttacaccgacagtaaagaagagttccccgactttaccgccttctggtttgatacggtaaaaccgggggcaactacctttaccgtttatgcgttgctcgatagcgccagcattactggtgcctataagttcactatccattgtgagaaaagtcaggtgattatggatgtggaaaatcacctgtatgcgcgcaaagacattaaacagctgggcattgcgccgatgaccagtatgttcagctgcggtactaatgaacgtcggatgtgcgatacaattcatccgcaaattcatgactctgatcgtctgtccatgtggcggggcaacggcgagtggatttgccgtccgctgaataatccgcaaaaattgcagttcaatgcttacaccgacaacaacccgaaagggtttggtttattgcaactggatcgtgacttctcccattatcaggacattatgggctggtataacaaacgcccaagtctgtgggtggaaccgcgtaacaagtggggtaagggcaccatcggcctgatggaaatcccaacaacgggcgaaacgctggataacattgtctgcttctggcagccagaaaaagctgtaaaagcaggtgatgagtttgcattccagtatcgtctgtactggagtgcgcaaccgcctgttcattgcccattagcgcgcgttatggcgacgcgtaccggcatgggcggtttctcggaaggttgggcgccaggtgaacactatcccgaaaaatgggcgcgtcgttttgccgtcgatttcgttggtggtgatctgaaagctgccgcgccaaaaggcattgagccggtgattacgctttccagtggggaagcgaagcaaatcgaaattctctatattgaacccatcgatggttatcgtattcagtttgactggtatccgacttcggactccactgatccggtcgatatgcggatgtatctacgttgtcagggggacgctatcagtgaaacatggctgtatcagtatttcccgccagcgccggataaacgtcagtatgttgacgaccgcgtgatgagttaatcgttttttcttcggcaccttcttcgggaggtgccgtctggttaaacacgatcccgctcgcatttttccctaagttaaatgagtaatctgatggtgtgtatttcagatacaccttgtcagccactaacagggagtgcgtatgtttccagaataccgagatttaatatcccgtctgaaaaacgaaaatcctcgctttatgtccttgttcgataaacacaataaacttgatcatgaaattgccagaaaggaaggttccgacggtcgagggtacaatgcggaagtggtccgcatgaaaaaacaaaagctacagttaaaagatgagatgctcaaaatcctgcagcaggagagcgtcaaagaggtgtaaactttcctaagccgccagccaggcggcttttttaacaactgcatggattgactggagataagatgactgaaacgataaaagtaagcgaatcacttgaattacatgctgttgcagaaaatcacgtcaaacctctttatcagttaatctgtaaaaataaaacctggttacagcagtcgctaaactggccgcagtttgttcaaagtgaagaggacacgcgaaaaacggtgcagggtaatgtgatgttgcatcaacgcggctatgccaaaatgttcatgattttcaaagaagatgaacttatcggcgttatctcgtttaatcgtattgaaccactgaataaaaccgctgaaataggctactggctggacgaatctcatcaggggcaggggatcatttctcaggcgctgcaggcattgattcatcattacgcccagtctggtgaacttagacgcttcgtgatcaaatgtcgggtggacaatccgcaaagcaaccaggtcgctttgcgcaatggttttatccttgaaggttgcctgaaacaggctgagttcctgaatgatgcctatgatgatgtgaacttatacgcgcgtattatcgattcacaataaccctgccagcggcgttcgcgtaatgcgctcctcgccgttaatgacttttggaccacggacatgaaccgtgtcgccatcaaaggcttcaacgacggcgtggtcggttaactccacatggttttcaattatcaccgcacctgtaatacggctctcaccttgtatgacaacgtgctcgtcgagcagaatcggtccgccacgtaccacggcatttccgccaaccaagacatgatgttttaacacacaattaccttccacaatggcatattccgccacctgcgaactgtaatgaatcgtcggaatggcatcttcttctatgccagctttcacctgcgcgtgaccgtagactttagcgcaatcgcatagccagacattgttctcttcattaccttcaatactggcaaaatcaaaaacttcggcgcgatgttcaataaaagcataccggacgacggcatcgccataaatttgtgcctggtggacaatacgcgaggcgctaacccttgcgcgatcataaatttggagcaggagttgatggtcgggcgttaagccttgtgcggcgacgatcatagaatgttgatcaattaaggcgtgaccaaatattctacattgcccgtaaactaatgagtcatgaatggtgacgctgtcacttatatatgcaccctggctgatttcactattatcgatccagacgttatccgttgcgtaaacctctccccacagcacgctggtgccggtgatacgcgtattaccggaaatcaccgctccgccgaacgcaatagcattctggtcgtaaatccagcaatttccttcttgtgctaacaccgtttcgcgatcgatccagccgccagcggttcctgctatcacatcgttaaaatcgctaatggcgataatctgccgtaataacacattttttttagtgccatcttcctgataactaaaggctcgctgttcttcacttagacgatatttgcgcatagcgttttcccacaggtgacttactataaccgtagcaaattctgcggctctggctatgctcgagaaaattccataaaatgcatttcaaatatactttataaattaaacaaaatgagtaagaagatgcagagcgataaagtgctcaatttgccggcaggctactttggtattgtgttggggacgatagggatgggatttgcctggcgctatgccagccaggtttggcaggtcagccactggttaggggatgggctggtgattctggcgatgatcatctggggattattgactagcgcatttattgcccgactcatacgctttccgcatagcgtgctggcggaagttcgccatccagtgctgagcagttttgtgagtttgtttccggcaacgacgatgctggtggcgattggttttgttccgtggtttcgcccactggcggtgtgcctgttcagttttggtgtcgtggttcagttggcttatgccgcctggcaaactgcgggattatggcgcggatctcaccctgaagaagctaccacgcctggactgtatctgccgacagttgccaacaactttatcagcgcaatggcctgtggtgcgttgggctacaccgacgccggtctggtgtttttaggcgcaggcgttttctcatggctaagccttgaaccggtgatcttgcagcgtctgcgcagttcgggagaattacccacggcactgcggacatcactcggcattcagctcgctcctgcgctggtggcttgtagtgcctggctgagcgtcaacggcggcgagggtgacacgctggcgaaaatgcttttcggttatggactgctgcaactgctgtttatgctacgtctgatgccatggtatctctcccagccatttaatgcttcattctggagtttctcgttcggcgtatctgcactggcaaccaccggtttgcatctggggagtggcagcgataatggatttttccatacgctggcggtgccgctgtttatctttaccaattttattattgcaatactgctcatccgtacttttgcgcttctgatgcagggaaaattgttagtcagaaccgagcgcgccgttttaatgaaagcagaggacaaagaatgatcattcgtgacgaaaactattttactgataaatatgaattaacccgcacacactctgaagtactggaagcggtgaaagtggttaaaccgggtaaaacgctggatctgggctgtggcaatggtcgtaacagtctttacctggcagccaatggttatgatgttgacgcatgggataaaaatgccatgagtatcgccaacgtcgagcgcattaaatccattgaaaatctggataatttacacacccgagtcgttgatctgaataacctcacatttgatagacagtacgattttattctttcgactgtggtgctgatgttccttgaggctaaaaccatccccgggttgattgccaatatgcaacgttgcactaaacctggtggttacaacctgattgtggcggcgatggataccgctgattatccatgtaccgtcggcttcccgtttgccttcaaagagggagaattacgtcgatattacgaaggctgggagagggtgaaatacaatgaagacgtcggcgagctgcaccgcaccgacgccaacggtaatcgtattaaactgcgtttcgccacgatgctggcacgtaaaaaatgacccggtaagcacaaaacgcgtgaaaattccccacgctgagatgatttactgttcttcttttcggtaagcatattttttatcgaagggatgtgaaattaatcacagtagtcgaagtttttagcagcttaacttactgaaatttaagtactgatgattgacttagcccctttttcggcattgactatgtcgtctgaaaaggggctgaaaaatttattttcaccaacactttttttgccacaacacgaagcggcgctttttgctataacttagaaagtaatataatcatctcaggaaactattcatgcgtaccacatcatttgcgaaagttgcagctttatgcggcttattggctctgtctggttgtgcatctaaaatcacccagccagataaatattctggttttttaaacaattactctgatttaaaagaaacaacctcggctacaggtaaacctgttttacgttgggtagacccgagttttgatcaaagcaaatatgacagcatcgtctggaacccaatcacttattatccggtaccgaaaccgtcgacccaggtagggcagaaagttctggataaaattttgaactataccaacaccgaaatgaaagaagcgatagcgcagcgtaaaccactggttaccaccgctgggccgcgtagtctgattttccgtggggccattaccggtgtagataccagcaaagaagggctgcaattctatgaagtggttcctgttgcattagtggttgcggggacgcaaatggctacaggccaccgtaccatggatactcgcctctattttgaaggtgagctgattgatgcagcgactaataaaccggttatcaaagtcgttcgtcagggcgaaggtaaagacctgaataacgaaagtacgccaatggctttcgaaaatattaaacaagttattgatgacatggcgaccgatgccaccatgtttgacgttaacaaaaagtagttccagacgcgccatcgttagatggcgctttttatccggtgcgccgtaaaaccccatccttcagggcggggatataaggcgcggttttccacctgaccaggtgtttgctgttgttcaatgtattggcggatgacggatattggcgcacctccgcagctactggcaaaatagccaggactccacaaaacgcctttgtagtaatacctgaatgcaatatctggtcgatctcgtcgcagtcacctacccgatacgcctttgaggctgtttaccagactggatatcgccagtttgggaggatagttaattaacaaatggacgtgatctggttcgccatccatttcaaccagttcagcttcaaaatcagcacatacatttgaaaagtaagtgcgtagtttttctgtcgcgtcatggtcaaaaatctggcgtcggtatctggtgacaaagagcaggtgaacatgcatcaggaaaacacaatgccttccacgccggatatcggtttcttttttcacagaccaaagtatcatttgacctgtgaaacgattacaggcatttaaattccagttaagacccggtggtcaacaggagtgtgaaatgaggcgcttcgcaggcgcatgtcgtttcgttttcaatcgtgctctggcacgtcagaatgagaatcatgaggccggtaataaatacatcccttacgggaaaatggcttcctggctggttgagtggaaaaatgccactgaaacgcaatggcttaaagattctccctcacagccattgcaacagtcactgaaagaccttgagcgggcttacaaaaacttcttccggaagcgggctgcttttccccgattcaaaaagcggggacagaatgatgcattccgctacccgcagggcgttaagctcgatcaggaaaacagccgtatttttctgccgaaactgggctggatgcgctaccggaacagccgtcaggtcacgggtgttgtgaaaaatgtcactgtcagccagtcctgcggtaagtggtacatcagtattcagacagaaagtgaagtatcaactccggttcacccttcagcatcaatggtcgggctggatgctggcgtggctaaactcgccacgctgtcagatggcacagtctttgagcctgtaaacagttttcagaaaaaccagaagaagctggcgagacttcagcgacagttaagccgcaaggtcaaattcagcaacaactggcaaaagcagaaacgcaaaatacagcgactgcattcctgtatcgcaaatatccgcagggactaccttcacaaagtcacaacggccgtcagcaaaaaccacgcaatgatagtcattgaggatttgaaggtcagcaacatgtcaaagtcagcagcgggtacggtcagccagccggggcgcaatgtccgggcaaaatcaggtttaaaccgttcgatactggatcagggctggtatgaaatgcgccgccagcttgcgtataagcagctctggcgtggcggtcaggtgcttgctgttccgccagcgtatacaagccagcgttgcgcgtactgtggtcatacagcgaaagagaaccgcctgtcacaaagtaaattcagatgccaggtatgtggatatacagcgaacgccgatgtaaatggcgctcgcaacattttagcggcggggcacgccgttcttgcctgtggagagatggtgcagtcaggccgcccgttgaagcaggaacccaccgaaatgattcaggcgacagcctgaacgtagcagggatccacgtccttcagggcgtggaggatgtcaatatcggtttctgtcagcgattaaattcaacaccacgtaacaaacgcctccggcaattaatccccaaaacgcagaaccaatcccgaccagcgtcaatccacttgccgttaccagaaatgccaccaccgccgcgtctcgctcacgctcattatgcagcgcctgatacaaactgccgccgatggtacttaacagcgccagacctgccagcatctggatccaacttacgggcagggcagccatcatcccggtaatggcactaccaaacagacctgcgagcaaatagaaaatgcctgcaacggcagcggccagccaacgttgatctttatccggatgcgcttccgggctttggcaaatagccgcggtgattgccgcaataccgacggaataaacgccgaaaggggaaaaaaccagtgccagcaatccagtaaatacaattaatggcgaaacaggagccgaatatccagctgctttcattgctgcgatacccggtgcgttttgcgatgccatcgtcaccagaaaaagggggagtgcaacgctcaggctgtgagcaaacgaaaaatcaggggtaatataagtggggagaacgggtttaaagacaacatcagttgtgacaacgtcaccttgcgcgatgacgatcacgatcccaataatcatcgcggcaattaccgcatagcgcggcgcaacggccttggttgccagccataccagcaacatacttccacacaacgtaaattgaccgtccagactggcaaacgcctgtaaaccaaagcgtaataaaatcccggcaagcattgccgccgcaagcgagtgcggaataatgcgcatcagacgagcaaagagtcccgttatgccgcagaggactattagcgcgttggtgacaataaaaacgccgatggcttcgttaagtgttagtccctgcaatccggtgaccaacaaagccgcgccaggcgttgaccatgcggtgagaacaggtacgcgataccataatgtcagagtcagcgtactgacgcccattgccagccccagcgccgtcatccagccagagatttgtgcagtggtggctccggcgacaatcgctgcttgccagattattgccgctgaactggcgtagccaattaataccgccagaaaccccgccagtagcgtgggtggaggaatagaaaacagacgcatagtcacctcgtgcgttatagcgtacaggcaccgtagcatttgtccgttataacgcacaagtgataaacttccgttttgccggaggagtcgcatggaaaatctcgctcgctttttatccaccacacttaaacaactacgccagcagcgcggctggagtctttcgcgactggcagaagcgacgggcgtttctaaagcaatgttagggcagattgagcgtaatgagtccagtccgacggtcgcgacattatggaaaattgccaccgggttgaacgtaccattttcaacatttatttctccgccgcagtccgctacgccttcagtttatgatccacaacagcaggcgatggtgatcacttcgctgtttccttatgatccacaactctgctttgaacacttctcgattcagatggcatctggtgcaataagcgaatcgacgccccatgagaagggggtaatcgaacatgtcgtcgtcattgatggacaacttgatctgtgcgttgatggggaatggcagacccttaattgtggggaaggcgttcgatttgctgcagacgtcacgcatatctatcgtaatggtggggagcaaaccgtacattttcattccctcatccattacccgcgcagttaagcgggaaaactatttcgcaacgtcgcgcttgtggctaaaatagccgccatttttcagctactggataagaatgtgaccgtatcttctcatcgacttgaactgttaagcccggcacgcgatgccgccattgcccgcgaagctattttgcacggtgccgatgctgtttatatcggcggccctggttttggtgcccgtcataatgccagtaatagcttgaaagatattgccgagctggtgccgtttgcccatcgttatggtgcaaaaattttcgtcacgcttaacaccattttgcatgatgatgagctggaacccgcgcaacggctgattactgacctctaccagaccggtgtcgatgcgctgattgttcaggatatggggattctggaacttgatattccgccgattgaactgcacgccagtacgcagtgcgacattcgtacagttgaaaaagcgaagttcctctctgatgttggcttcacgcagattgtgctggcgcgagagctgaatcttgatcagatccgcgcgattcaccaggctacggacgcgaccattgaattctttattcatggggcactgtgcgtggcctattcgggtcagtgctacatttctcatgcgcaaacagggcgtagcgccaaccgtggcgattgctcgcaggcgtgccgtttgccatacacattgaaagacgatcaggggcgggtggtttcctatgaaaaacatctgctgtcgatgaaagataacgatcagactgccaacctcggcgcgctgattgatgctggtgtacgctccttcaagattgaagggcgttacaaagatatgagctacgtgaagaatatcaccgcccattatcgccagatgcttgatgccattattgaagaacgtggcgatctggcgcgcgcttcatcaggtcgtactgaacatttctttgttccatcgacggaaaagactttccaccgtggtagcacagattattttgtgaatgcccgtaaaggcgatattggcgcgttcgattcgccgaaatttatcggcctgccggtaggcgaagtagtgaaagtggcgaaagatcatctcgatgttgccgttaccgagccactggcaaatggcgatggcctgaacgtgttgattaaacgtgaagtcgtcggttttcgtgccaatacggtcgagaaaaccggagaaaatcagtaccgcgtctggcccaatgaaatgccagcagatttgcacaaaattcgtccacatcacccactaaaccgtaatcttgatcataactggcagcaggcactgacaaaaacctccagcgaacgtcgggtggcggtagacattgaactgggcggctggcaggaacaactgattctgaccctcaccagtgaagagggtgtcagcatcacgcatacgctggacgggcagttcgacgaagccaataacgccgaaaaagcaatgaacaatctgaaggatggtctggcaaaactggggcaaaccctctattacgcccgcgatgtgcaaattaatttgccgggggcgctgtttgtaccaaacagtctgttaaaccagttccgccgtgaagctgctgacatgctggatgctgcgcgtcttgccagttaccagcgcggcagccgtaaaccggttgctgatcctgcgccggtttatccgcaaacgcatctgagtttcctcgcgaacgtatacaaccagaaagcgcgtgaattttatcatcgctatggtgtgcagctgattgacgcggcgtatgaagcacatgaagagaagggcgaagtcccggtgatgatcaccaagcattgtctgcgctttgcctttaatctgtgcccgaaacaggcgaaaggcaatatcaaaagctggaaggcgacgccaatgcaactggttaacggcgatgaagtattaacgctaaagtttgattgccgcccatgcgagatgcacgtcattggcaaaatcaaaaatcacatactgaaaatgccgttaccgggaagcgtagtggcatccgtaagtccggatgagctgctgaaaacattgccgaagcgaaaagggtaaaacgccagttttctggttactcacaacttattgaatctgcatgatattgcctgccgggtaaggcgttacgccgcatccggcatcaaatgactcaacgttgtcccgcttctggtttgcgcgatttttgccagtaaaaatgctcgcgcaaaccttccgccgactcttccgccacagcacgcaattcatcgctgtccgcttcatgacgcagctgatgatccacattctttacccacacaaattcatgtcctttgtgccctgccatgagttgtcctgaaaacagagcacacgttaataagacaaccgataacgccttcgtaaacatcctgccacctttttcttaccttttgccgctatgatgccgatcgtttcttgaggttattattcagttttgcaaattagcgcaaagaaattctggaatcttccttcctgattttgcattgcattctgccgttgcggcgatttagtgctattttcgagcaaattacacacggaggtaaacactaatgtttactttgttgatatactcagcggcagggaggcgatgtgaaacaaagcgagttcagacgttggctcgaatctcagggcgtcgatgtagcgaatggcagcaaccatttgaaactcaggtttcatgggaggcgcagtgtcatgccgcgtcacccctgcgatgagattaaagaaccattgcgtaaagcaatcctgaaacaactcggtttgagttaatcgccaattaaaaaggttaatgacatgcgagagacagtcgaaattatgcgttatcccgtcactcttacacccgcgccggaaggcggttatatggtttcttttgtggatatccctgaagcgttgacccagggcgaaactgtcgctgaagcgatggaagcggcaaaagatgctttactgaccgcatttgatttttattttgaagataacgagcttatccctttaccttcgccattaaatagtcacgatcactttattgaagtacctttgagcgtcgcctctaaggtattgctgttaaatgcttttttacagtcagaaatcactcagcaagagttagccaggcgaattggcaaacctaaacaggagattactcgcctatttaacttgcatcatgcgacaaaaatcgacgccgtccagctcgcggcaaaggcgcttggcaaagagttatcgctggtgatggtttaattacagttaacgaaaagttgtcatttttaacaactgatatagactgccgaatcatctgcacataattacgattcgataatgaaaaaataccagcagcttgcagaacaattacgcgagcagattgcgtcgggtatctggcaacccggcgatcgtttgccttcgttgcgtgaccaggtggcgctttcaggcatgagctttatgactgtcagccatgcctatcagttgctcgaaagtcagggatatattatcgcacgaccgcagtcgggttattacgttgcgccacaggcaataaaaatgccgaaagcgccagtcattccagtcactcgagatgaagcagtcgatatcaacacttatatttttgatatgttgcaggccagtcgcgatccgtcggtcgttccgtttgcctcggcctttcccgacccgcgacttttccccctccaacaactaaaccgctcgctggcgcaggtaagcaaaaccgccacagcgatgagcgtgattgaaaacttaccgccaggaaacgcagaactgcgtcaggctattgctcgtcgctatgccttacagggcatcaccatttctcctgatgaaattgtcattactgccggggcgttagaggcattaaacctcagtttgcaagcggtaactgaaccgggcgattgggtgatagtagagaatccttgtttctacggtgcgttgcaggcgctggagcggctacggctgaaggcgttatcggtggcgacggatgttaaagaagggatagatcttcaggcgctggaactggcgttgcaggagtatccggtgaaagcgtgctggctgatgactaatagccagaatccactcggatttaccttaacgccgcaaaaaaaagcacaactggtggcgttgctcaatcagtacaacgtaacgctgattgaagatgacgtttacagcgaactttattttggacgggaaaaaccgctgcctgcgaaagcgtgggatcgccacgatggcgttttgcattgctcttcgttttcgaaatgtctggtgcctggttttcgtattggttgggtcgccgccggaaaacatgcacgtaaaattcaacgcttgcagttgatgagtacgctttccaccagctcaccgatgcaacttgcgctggtggattacctttccacgcgccgatacgacgcccatcttcgtcgcctgcgtcgccagcttgcggaacgtaaacaacgtgcctggcaggcactgctgcgttatctgcctgcggaagtgaaaattcatcataatgacagtggttactttctctggttggagctccccgagccgttagatgccggcgaattaagcctggcggcactgacgcatcatatcagtattgcgccgggtaaaatgttttctaccggtgaaaactggtcacgttttttccgttttaataccgcgtggcagtggggagagcgtgaagaacaggcggtaaaacaattaggcaaacttattcaagaacggctgtaatagcgtttaatttaattcctcttagattgggtaatatgaatttcgaatagcagtcatatttcctaactccttgactatactccagaagataaccttacagacggcataatgcgcggtagctcacaacctgaataaattttctcaggggcgaaggtgtgcctgcaagccgccgtctatggttaaacaaggagatatttttacggcacggcggctgaacaattaattacgacaggagtaagaccttatgagcaagacatttgcccgcagcagcctgtgtgcgctcagcatgacaataatgaccgctcacgccgccgaaccgcctaccaatttagataaaccggaagggcgactggatattatcgcctggccgggatacatcgaacgcggacaaactgataaacaatacgactgggtaacgcagttcgaaaaagagacaggctgcgcggtgaatgtgaaaaccgccgcgacttccgatgaaatggtcagtctgatgaccaaagggggttacgatctggttacggcatccggcgatgcctcgctgcgtttgattatgggtaaacgcgtgcagccgattaataccgcattgattcccaactggaaaacgctcgatccgcgcgtggttaaaggcgactggtttaatgttggcggcaaagtttacggcacaccttaccaatgggggccgaacctgctgatgtacaacactaaaaccttcccgacgccgccggatagctggcaagtggtttttgttgagcaaaatctgccggacggcaagagcaataaaggccgcgttcaggcttatgatggccctatctatattgcggacgctgcgttgttcgttaaagccactcagccgcagttgggcatcagcgatccgtatcaactcaccgaagaacagtaccaggcggtgctgaaagtgctgcgcgctcaacacagtttgatccatcgctactggcatgacactaccgtgcaaatgagcgatttcaaaaacgagggtgtggttgcttccagtgcctggccctatcaggccaacgccctgaaagccgaaggccagcctgttgctaccgttttcccgaaggagggtgttaccggttgggctgataccaccatgctgcatagcgaagcgaaacatccggtttgcgcctacaaatggatgaactggtcattaacgccaaaagtgcagggcgatgtggcggcctggtttggctcgttaccggtagtgccggaagggtgtaaagccagtccgttattaggcgaaaaaggttgtgaaaccaacggttttaactatttcgacaaaatcgccttctggaaaacgcctatagcagaagggggcaagtttgttccctacagtcgctggacgcaggattacattgccattatgggcggtcgctaacttcgctggggtgctttatgacgtacgcagtggagtttgacaacgtctcgcggttgtacggtgacgtgcgcgcagtagatggcgtcagtattgcgataaaagatggtgagttcttctctatgctggggccgtccggctccggcaaaaccacctgcctgcgcctgattgctggcttcgaacagctttccggcggggctatctctatctttggtaaacccgccagcaatctgccaccgtgggagcgggacgtgaatactgtctttcaggactacgcgctatttccgcatatgtcgattcttgacaatgtcgcctatgggctgatggtcaaaggcgtgaataaaaagcagcggcacgcaatggcgcaagaggcgctggagaaagtggcgttggggtttgtacatcaacgtaaaccgtcacaactttctggtggtcagcgccagcgggttgctatcgccagagcattggtgaatgaaccgcgcgtattgctgttggatgaaccgctcggcgcactggatctcaaattgcgtgagcagatgcagctggaactgaaaaaactgcaacagtctctcggtatcacttttatcttcgttacccacgatcagggcgaagcgttatcgatgtccgatcgtgtggcggttttcaataatggacgcattgagcaggtcgattccccgcgcgatctctatatgcgcccgcgcacgccgtttgttgccgggttcgttggtacatcgaatgtttttgatggactgatggcagagaaactttgtggcatgacgggaagcttcgccctgcgaccggaacatatccgcctcaacacccctggtgaactgcaggccaatggcacgatccaggcggtgcaatatcagggcgcggcaactcgttttgaactgaaattgaacggcggtgaaaaactgcttgtgagtcaggccaatatgacaggcgaagaactgcctgccacgctcacgcccggacaacaggtgatggtttcctggtcgcgtgatgtgatggtgccgctggttgaggagaggtgaatggcgatgaatgtattgcaatcaccttcacgtccaggtctgggtaaggtgtccggtttcttctggcataatccggggctggggctgtttttactgctgcttggcccgctaatgtggtttggcattgtctatttcggctcgctgctgacactgttatggcagggattttatacttttgacgatttcaccatgtcggtaacgccggaactgacgctggcgaatatccgtgcgctgtttaatccggcgaattacgacatcattctccgcacgctgactatggctgtggcagtcactatcgccagcgccattctggcttttccaatggcgtggtatatggcgcgctataccagcgggaaaatgaaagcgtttttttatattgcggtaatgttgccgatgtgggcgagctacattgttaaagcctatgcctggacgttattgctggcaaaagatggcgtggctcagtggtttttacaacatcttgggctggaaccactgctgactgcgttccttacattacctgcggtgggcggaaatacgctgtcaacttccgggctggggcgctttctggtgtttctctatatctggttgccgttcatgatcctgcccgttcaggcggcgcttgagcgtttgccgccgtcattgttgcaggcgtcggctgatctcggcgcacgtccacgacaaacctttcgctatgtggtgctgccgctggcaatcccgggtattgccgctggctctatctttaccttctcactcacactgggcgattttatcgtcccgcagctggttggtcctccaggatattttatcggcaatatggtttattcccagcagggggcgattggcaatatgccgatggcggcggcattcaccctggtgccgattattctcatcgcactgtacctggcgttcgtgaaacgtctgggagcgttcgatgcactctgaacgcgcaccgtttttcctcaaactggcggcctggggcggcgttgttttcctacattttcccatcctgataatcgccgcctatgcgtttaacactgaagatgcggcgtttagttttccaccgcagggcctgacgctgcgctggtttagcgtggcagcacagcgtagtgatattcttgatgccgtgacactgtcacttaaagtggcggcgctggcgacattaattgcgctggtgttagggacgctggcagctgccgcgctgtggcgacgagactttttcggcaaaaacgccatttcgctgttactgctgctgcccattgcgctgccgggcattgtcactggtctggcgttattaaccgcctttaaaaccatcaatctggagccgggatttttcaccatcgtggtcggtcatgcgactttttgtgtagttgtggtgtttaacaatgtcatcgcccgttttcgccgcacctcctggagtctggttgaggcgtcaatggatcttggggccaatggctggcaaaccttccgctacgtagtgttgccgaatctcagttcggcgttactggcaggaggaatgctggcgtttgccttgtcgttcgatgaaatcatcgttacgacctttacggcaggtcatgaacgaacgttaccgttgtggttgctcaatcagcttgggcgaccgcgtgatgtaccggtaactaacgtggtggcactgctggttatgttggtaacaaccttgccgatcctgggggcctggtggctaacccgcgaaggcgacaatggtcaataaccactgatacaggaatatgctatgcaacataagttactgattaacggagaactggttagcggcgaaggggaaaaacagcctgtctataatccggcaacgggggacgttttactggaaattgccgaggcatccgcagagcaggtcgatgctgctgtgcgcgcggcagatgcagcatttgccgaatgggggcaaaccacgccgaaagtgcgtgcggaatgtctgctgaaactggctgatgttatcgaagaaaatggtcaggtttttgccgaactggagtcccgtaattgtggcaaaccgctgcatagtgcgttcaatgatgaaatcccggcgattgtcgatgtttttcgctttttcgcgggtgcggcgcgctgtctgaatggtctggcggcaggtgaatatcttgaaggtcatacttcgatgatccgtcgcgatccgttgggggtcgtggcttctatcgcaccgtggaattatccgctgatgatggccgcgtggaaacttgctccggcgctggcggcagggaactgcgtagtgcttaaaccatcagaaattaccccgctgaccgcgttgaagttggcagagctggcgaaagatatcttcccggcaggcgtgattaacatactgtttggcagaggcaaaacggtgggtgatccgctgaccggtcatcccaaagtgcggatggtgtcgctgacgggctctatcgccaccggcgagcacatcatcagccataccgcgtcgtccattaagcgtactcatatggaacttggtggcaaagcgccagtgattgtttttgatgatgcggatattgaagcagtggtcgaaggtgtacgtacatttggctattacaatgctggacaggattgtactgcggcttgtcggatctacgcgcaaaaaggcatttacgatacgctggtggaaaaactgggtgctgcggtggcaacgttaaaatctggtgcgccagatgacgagtctacggagcttggacctttaagctcgctggcgcatctcgaacgcgtcggcaaggcagtagaagaggcgaaagcgacagggcacatcaaagtgatcactggcggtgaaaagcgcaagggtaatggctattactatgcgccgacgctgctggctggcgcattacaggacgatgccatcgtgcaaaaagaggtatttggtccagtagtgagtgttacgcccttcgacaacgaagaacaggtggtgaactgggcgaatgacagccagtacggacttgcatcttcggtatggacgaaagatgtgggcagggcgcatcgcgtcagcgcacggctgcaatatggttgtacctgggtcaatacccatttcatgctggtaagtgaaatgccgcacggtgggcagaaactttctggttacggcaaggatatgtcactttatgggctggaggattacaccgtcgtccgccacgtcatggttaaacattaaggataatattgcagatcgtaagagtatgagatgatcttgcgtactgtcagagcactgatttctctgacagtacgtgctgcgtgcaaaatcactacatcaaataaaccagccaaatctcatagagataagagtaaacaaaccaacagcagcaaagaaatttatcagtactacagttctactggaaacattcatttttgccaccttttatcattgcccctatgtgtatagtacgggttaagaaaatccgcaataatactcattctgaagatggataagggcaagttgctgtttgatgattttttctcaaactggtgaaaaaacttgatgcacgtcaaaaaatgacgcatatttgcgcgcgttttattcatctggctggacgcccgtacatgtctctctatcaacacatgcttgttttttatgcggttatggcagcaatcgcatttcttatcacctggtttctttctcacgataagaaacgcatccgtttcttaagcgcctttctggtgggggcaacatggccgatgagtttcccggtggcgctgttgttttcactgttttaaatcttactcactggcttgacggcaccacgcagacttatatcatttggatgaatcgataaatttcacaagtggctaaggagaaagtatgtcgcatctggatgaagtcatcgcgcgcgtggatgccgcgattgaagagagcgtcattgcccatatgaacgaattattaatcgccctgagcgatgacgcggagttaagtcgggaagatcgctacacccagcagcaacgtctgcgcacagcgatcgcccatcacggtcgcaagcataaagaagatatggaagcgcgccacgaacagttaaccaaaggcggcaccatcctctgattaaaatgagcgtctggctaccaaccaggcgccaaccacaagtaaaattgcgccacaaattgggccgaacaacgcccgtagtggtacgccatgactgcggaagatatccagcatcagaccgccaatcagctgactggcgaccagtacagcaatagttgtcgccgctcccacattctgatatccgctgatactggcgaagacaaaaaacgatcccagcaagccaggtataagtgtccaccagcgcacgctggacaccagttcgccaaaccccgccatgccttgtttaaaccataaaatagaaacaaagagcacaatccccaccagtgagttcagcaacatggcgatgagaatggtagaggaggtctgggtgatgcgcaccatcagcgtgttctggacaaccagaccaattccggcggcaatcaaaaaagcaagggtgagcgactgattcatccaatcgcgtccggttcagtgcgctcgtcgagttgcaactgcataaatgtcagatccagccaacgaccaaatttagtgcctacctgcggcatttgcgcggtgacgacaaatcccagcgactggtggagatgcagcgaggcctgattttgcgattcgatcccggcgaccatgacatgcttcccgcaatcccgcgcttcatcaatcaatcggcttaacaatttacgccccagacctttgccctgatgatcgggatggacataaaccgaatgttccacggtatggcgaaaaccatcgaaactacgccagtcgccaaacgaggcatatcccgtcactacgccgttttcctcgctcaccagcactggataacctgctaaagtccgcgcttcaaaccaggcaatgcggttatcagcatccaccgtttggtcattccagatagccgccgtatacaacacggcgtggttataaatttccgcaatggcagcacagtcggctttgcgggcaaaacggatggacatgtctggcctcaataaaataatgatgatgatgttatcaatactatcgaaaacagcccgaagcaacggattcctcgatgaaattattgcgtgttgcagaggggatgtgacggctgcaaacaaaaccaatcccgtgagcctgctactattgatggattcatgccaaaagcacaggagagcattatggggcaacaaaagcagcgtaatcgacgttgggttctggcctcgcgtccacatggcgcacctgttccggagaatttccgtcttgaagaagatgatgtcgccacaccgggtgaaggacaggtgttactgcgcacagtttatttgtccctggacccgtatatgcgtggacgtatgagcgatgagccatcttattcaccgcctgttgatattggcggcgtgatggtcggcggtacggtgagccgtgtcgtggagtcgaatcatcctgattatcagtctggcgactgggtgctgggctacagtggatggcaagactatgacatatccagtggtgatgatctggtgaaacttggcgatcatccgcaaaatccatcgtggtcgctgggtgtgctagggatgccaggctttaccgcttatatgggcctactggatatcggtcagcctaaagagggcgaaacgttggtggtagctgcggcgacaggaccagtgggggcgacggtggggcaaatcggcaaacttaaaggttgcagagtggtgggggtagccggtggcgcggaaaaatgccgccatgctaccgaggtgttaggcttcgatgtttgtcttgatcaccacgcggatgattttgccgaacaactggcgaaagcgtgcccaaaaggtattgatatctattatgaaaacgtgggcggtaaggtattcgatgcggtgctaccgttacttaatacatctgcgcgcattcccgtctgcggattagtgagcagctataacgctacagagctaccacccggtccggatcgtttacctctgttgatggctacagtgctgaaaaaacgtattcgcttgcaaggttttattatcgctcaggattatggtcaccgcatccatgagtttcagagggagatggggcaatgggtgaaagaggataaaatccactaccgcgaagaaattactgacggtttagagaatgcgccacagacgtttatcggcctgctgaagggtaaaaacttcggcaaagtggtgatccgcgtggcgggtgatgattaaagtttcaacggcggcgtaagccgccataaaaatccaggcaaaaagcttattttcagctttaattaactaaccacatcattgttctgctgctaataacaacaaaggtgagtggtttatgattattcactttaatacaccaggtgaattccttctgccatgcaggcagggttggacagaaaacacgcgaaggaattaaaatgcctggaacgggaaaaatgaaacatgtcagtttgactctgcaggttgagaacgacctgaaacatcagcttagtattggcgcattaaaacctggcgcacgcctgattactaaaaatctggcggagcaattaggtatgagtattacacctgtgcgtgaagcattattacgtctggtttcggtgaatgcgctttctgtcgcacctgcacaagcatttacagttccggaagtggggaaacgtcaattagacgaaatcaatcggatccgctacgaactggaattaatggcagttgctctggctgttgaaaacctcaccccgcaagaccttgcggaactccaggaattgctcgagaaattacagcaggcgcaagaaaagggcgacatggaacaaatcattaatgtaaacaggctatttcgcttagcgatttatcatcgctcaaatatgcccatcctgtgtgagatgattgagcaactgtgggtcaggatggggcctggtttacattatctctatgaagcgattaatccagcggaattacgggagcatatagaaaactatcatctgttactcgctgcgttaaaagcaaaagacaaagagggatgcagacattgtcttgctgaaattatgcaacaaaatattgctattttataccagcaatacaatcgttaaagtaaatgcccggcaaataccgggcatcaaggtaattactcaaatctccacgcaatattcatgccgacaccataatttcgtccgggcgaaggttcgtaatatcgcccgtttgactcattgacaatgacagaaccaacgtattctttatcgaataaattatcgacacgaccaaataaatccacagttaaattgtggtaattgtatttatacccggtgaataagccgacgagagtataagacggcgcttttgccgtattttcatcatctgccataatatcgcccatataacgcgcttccgtgcctgcataccaaccatcttccggtacataacctatcgacgcaaagcccatattacgggcgatccctggcatccgattaccgttacaatcctgttcattgcaaacattgctgcgataggtcgcatcaagccaggtccaggacgcgtttacgcgaaaatctcctgcgaaacgttgatcccatgccagttcagcgccttgacgacgggtctttccggcatttttgtaagtcgtacgcccaccgctactgctatcgacaacaatttcatcatcagtgtcggtctgaaacaatgcgagactaagcagcccatcaccaatacgcgttttactgccgatctcaattgtatcgttggtggatggttttaaacctaagttcataccgctttgcccatcagcacgataagacagctcattaatcgtcggcgtttcaaaacctcgcccggctgccagatagatattccaggcatcggtcattgcatattttaacgaaccggcaggtagccatttatgataactggcatcaccgctgtcatcgccgttacccggagtaacgtaatggtcgttggaatcaaaccacacggagctgtagcgcacgccagcatccagcgacagtttttcgctcagctgccactgcgtctgtaaatagggatcgatgttccacatcagattgcgttcgtcgcgacgcaactcacctttttgcccgtactccggcatgccgctattcaggcggaagttattgtagcccttgcggttttcactcatgttttcgtagttcaggccggtagtgaacgtgaccggaacgcccagttcaccacggtgtgtccagcggctgtctattccctggtaatggcgttgcagggtaatcacgccgcccgcatgtgacgggttaagttgtggtgccatgggtattgactggtactgggtcgtttctcgctctccggcatacatcatcacactcatatcatcccgcgaactcaggctacgctcatagcgcaacccagcctgagtttgcttgatggtttttcgcgtgtcgtactgttctgcacgaggcgcttgttgtggattagccttccattctgctttggttagcccacctgggtcatctgctttgatatccacactattgaaaatcagacttaatttgctggcttcatcaatgcgtacgcccagtttggcattggctaaatttttctgtgcgccactatggtcacgatagccgtgggtcgtaaaacgcgtggttgagacggtgtaatcgacatcgccaggctgtgtgccgtctcccgttgcgcccgttgctttcagcccatagcgccagctgccaaaactgccgtagtaactactggcttcaatggttggtggctgttgtccggtctgggtggtgacattcattaccccaccagacgcgttgccatacagggcagagaaggggccacgcagcacttccacattttgcacactgcttaaatcgatgttggatgtttgcccttgcccgtcgggcatggtggcgggaataccgtccacatacaggcgaataccgcgaataccgtaagtggagcgggagccaaatccgcgaatcgacagctgtaaatcttgcgcatagttctgccggttttgtacctgcaaaccaggcacgccggtcagtgattcggacaagttaatgcgcggtgttgccaggcgcatctcctcgccatccaccacgcttactgctgctggggtatccagttctgaaaccacctgcggtgcggcactgacaatcatagtctgttcatcagcggcaaaaacaacgggggaaaggacaagcagtgcgggcaaaacggtctgtcggacggaaaaaatcttcatgaaaaaagccaggttaagaatgggaaaacgccgtcatggtaatgaaattgtaaatttatggaaaatgaaacggcacaatacgttaagtaattgagaaaattgtagtcgtaacggcaagaaatgctccacatttgagaaaataatgattaccattcccatttataacaagagcgtaacgatgattacgcttagcgaagcattgtgaagcagcaaaaatatcggttcatcaaagggagtcgtcatgcatttacgtcatctgttttcatcgcgcctgcgtggttcattactgttaggttcattgcttgttgtttcatcattcagtacgcaggccgcagaagaaatgctgcgtaaagcggtaggtaaaggtgcctacgaaatggcttatagccagcaagaaaacgcgctgtggctcgccacttcgcaaagccgcaaactggataaaggtggcgtggtttatcgtcttgatccggtcactctggaagtgacgcaggcgatccataacgatctcaagccgtttggtgccaccatcaataacacgactcagacgttgtggtttggtaacaccgtaaacagcgcggtcacggcgatagatgccaaaacgggcgaagtgaaaggccgtctggtgctggatgatcgtaagcgcacggaagaggtgcgcccgctgcaaccgcgtgagctggtagctgacgatgccacgaacaccgtttacatcagtggtattggtaaagagagcgtgatttgggtcgttgatggcgggaatatcaaactgaaaaccgccatccagaacaccggtaaaatgagtaccggtctggcgctggatagcgaaggcaaacgtctttacaccactaacgctgacggcgaattgattaccatcgacaccgccgacaataaaatcctcagccgtaaaaagctgctggatgacggcaaagagcacttctttatcaacattagccttgataccgccaggcagcgtgcatttatcaccgattctaaagccgcagaagtgttagtggtcgatacccgtaatggcaatattctggcgaaggttgcggcaccggaatcactggctgtgctgtttaaccccgcgcgtaatgaagcctacgtaacgcatcgtcaggcaggtaaagtcagtgtgattgacgcgaaaagctataaagtggtgaaaacgttcgatacgccgactcatccaaacagcctggcgctgtctgccgatggcaaaacgctgtatgtcagtgtgaaacaaaaatccactaaacagcaggaagctacccagccagacgatgtgattcgtattgcgctgtaatagatatggcgagggtgaaaacggtgagacttgcctgccttttatcacggcgtatccggcactttcgtcagtaatctgaatttgcccggcacgtagccgggcaattttgcaattaactcgccgtttcaggcttaaacacaatttcctgtttttcttcatcttcctcgacgactggcgcagtgctgtgaatttcagcaacgcgtttgcgcacaccaaaccagcctataaccagcaaaataccgataatcggcagcgccgcgatagtataagtcccgttcgggtaatcgaacgccatcagcacaaggacactcagtaaaaacagtaatgtcagccaggaagtgaagggcgcgccaggcagtttaaaactgacatccgctgctttgccttctttaatcgctttacgcaggcgcatctggcacacgatgataaacgcccatgaagcgatgattcccagcgacgcgaagttcaacacaatctcaaatacgcgcgacggcaccagatagttgaggaatacgccgacgacatacacaactagtgtcgccagaatcccggcatacggcacatgctgacgactcattttcgccataaaactcggtgcggaaccgcccatcgccattgagcgcagaatacgtccggtgcagtacagacctgaattcaggctggagagggcagcggtcagcaccacaatgttcataatgctgccgatatatggcacacccagtttagagaaaaacgtcacgaacggactttgccccgcctgatacgcgctccacggcaataacataaccagcaacaccacggagccgacgtaaaacaggccaatacgccaaatcacactgttaatggctttaggcaccatggtctgcggatctttacattctccggcagctgtacccaccatttcaatggaggcaaaagcaaacactacgccctgaatcaacaccagcgcaggcagcaaaccgtgggggaagaagccgccattatcggtgattaaatgaaagccagtggtgttgccatccagcggctgaccactaccgaggaacactgtacccacgaccaaaaaggtcacaatggcgagcactttaataagcgcaaaccagaactccatctccgcaaaccatttcacaccgatcatattcatggtgccaacgatggtaagtgcagcgagcgcaaagacccactgcggcacgccgccaaacgcaccccagtaatgcatatacagagcgacggcggtaatatcaacaatccccgtcatcgcccagttgatgaagtacatccagccagcaacataagcggctttctcacccaaaaactcacgggcataagaaacaaaactgccactggaagggcggtgtagcaccagctcacccaatgcacgcagaataaaaaacgaaaacaagccacaaattaaataaaccagtgccagtgcgggccccgccatttgcagtcgggctcctgcacctaaaaacaagccggtgccaatcgcgccgccaatggcgatcatctgcacctggcgattgcccatcgctttgtgatacccctcttcgtgggcattaagccagcggcgtttcgcggcgtgttgatctgaagtgtcggtgtcgtgtttactcattgctctccctgattgctttaatgaaaaagtcatataagttgccatgaacaatgtttattcatcctggcgatgatagttatcaccattattctttatgggtataaaactatcggcgcagcatcctacccgttatcgataaacgatgcaaaacatccccttacaatcctgaaggggattaatacaactgacgaaaaaatgacaaatccttttgctggttaacctgtgtactgtcctacacttaatctttaaaagattgtgaggggcatatgattaaggtgtatggcgtacccggatggggctctacaatcagtgagctgatgctaacactggctgatattccttatcagttcgttgatgtcagtggttttgaccacgagggagcttcacgcgagttattgaaaaccctgaacccgttgtgtcaggttccgacactggcattggaaaatgacgagattatgacggagacagcggcgattgcattgatggttctcgatcgtcgcccggaccttgcgccaccggttgggcgcgccgaacgtcagctgtttcaacggctattggtctggctggttgctaatgtctatccaacattcactttcgccgattaccctgagcgttgggctcctgacgcacctgaacagttaaagaagaatgttattgaatatcgaaaatcgctttatatctggttgaattcgcagctcactgctgaaccttatgcgtttggtgagcaactaacgctggtggactgttatctttgcactatgcgcacatgggggcctgggcatgaatggtttcaggataatgccacgaatatcagtgcgattgctgatgctgtatgtcagttaccgaaattacaagaagtattaaaaaggaatgaaattatttgagtgggataccagaagattatgttatttattattcagtaactttatccacaatgatgggcgtaattaattaaattcatggtatgttttttaatttatatcactctccttttcattcagcgtgtctatttcatttcctctgaaaagaaactaactattcacatcgtgcagatgtttcagttgttatcacaggcattctataatctcaaaatgtttttaatgatggatatgctcggagttggagatgcaattaatattaatacaaataaaaatatccggcaggtatgctaaaaggataaatggcgttctctgtatttattcgcaattatctgtaggacaaatatggagagcttgatgagtcagagctaaaacagcaattgattaataaacatgttgatttattcaagaaaatggatgtattttaaatgttgattcttaatataacctaatcaatagattatcaagtgagagctacacattattggaggggcaggggaaaacaccattttgggaacaatgcatcaggtactcttaccactgaagcaagatcatccggcaccaggtggtggtgcagtgctttggaaatggtcccctcgggggagttgtcattattttctatgctatttgcttattatattcatcaggtgaatttaataaattcctaatttgaaatatccactattaagctagtgtttaacgacgttaagatggcaatgtgcagatcatgttatcagggtggggcggtagcgtatattccttatacaaaccatcattcatttcaatgattgttattgaattatttattgttgtgaataaaaagacattatgaatattggtttgactttgcatatcaggttttttattactcgctgtaatgtacgagcctgtcgtgaataacgtcgagaacccatccgttgcgtttgtgattattttgttgactaaacagacacccgtttctctgaagtaaaatcccagactaaatcatcacataaccatgacatttttctgatattccccggtaacgccagatgtcgactcgcttaaccaccctcagccataccagtgaaggccaccgcgtgtcggtccactacggctatgacgataaaggccgcctgaccggcgaacgccagacggtggagaacccggagacgggggaactgctgtggcaccatgagaccggacatgcgtacaacgaacaggggctggcaaaccgcgtcacgccggacagtctgccgccggtggagtggctgacctacggcagcggctatcttgcgggcatgaagctgggcgggacgccgctgctggagttcacgcgcgaccgcctgcaccgtgagacggtgcgcagcttcggcagcatggcaggcagtaatgccgcatataaactgaccagcacatacacccccgcaggccagttacagagccagcacctgaacagcctggtgtatgaccgtgactacgggtggaatgacaacggcgacctggtgcgcatcagcggcccgcgacagacgcgggaatacggctacagcgccacgggcaggctggagagtgtgcgcaccctcgcaccagacctggacatccgcatcccgtatgccacggacccggcgggcaaccggctgccggacccggagctgcacccggacagtacactcacagtgtggccggataaccgcatcgcggaggatgcgcactatgtctaccgccacgatgaatacggcaggctgacggagaagacggaccgcatcccggcgggtgtgatacggacggacgacgagcggacccaccactaccactacgacagccagcaccgcctggtgttctacacgcggatacagcatggcgagccactggtcgagagccgctacctctacgacccgctgggacggcgaatggcaaaacgggtctggcggcgggagcgtgacctgacggggtggatgtcgctgtcgcgtaaaccggaggtgacgtggtatggctgggacggagacaggctgacgacggtgcagactgacaccacacgtatccagacggtatacgagccgggaagcttcacgccgctcatccgggtcgagacagagaacggcgagcgggaaaaagcgcagcggcgcagcctggcagagacgctccagcaggaagggagtgagaacggccacggcgtggtgttcccggctgaactggtgcggctgctggacaggctggaggaagaaatccgggcagaccgcgtgagcagtgaaagccgggcgtggcttgcgcagtgcgggctgacggtggagcaactggccagacaggtggagccggaatacacaccggcgcgaaaagttcatttttaccactgcgaccaccggggcctgccgctggcgctcatcagcgaagacggcaatacggcgtggcgcggggagtatgatgaatggggcaaccagcttaatgaggagaacccgcatcacctgcaccagccgtaccgtctgccagggcagcagcatgatgaggagtcggggctgtactataaccgtcaccggcactacgatccgttgcaggggcggtatatcaccccggacccgattgggttgagaggtggatggaatatgtatcagtatccgttgaatcccatacaagtgatagacccaatggggttagatgcgattgagaatatgacatcaggtggactaatttatgccgtatctggtgtacctggattgattgctgcaaacagcattactaacagtgcttaccagttcggttatgatatggatgctattgttggcggagctcataatggggccgccgatgcaatgagacattgttacttgatgtgtcgaatgactaagacatttggatcaacaatagctgacgtgataggtaaaaatcatgaggcggcaggggatagacaaggtcagccagctaaagaaagaatcatggatcttaaaaataacactgtcggtattgcttgtggcgatttttctgccaaatgtagcgatgcatgtattgaaaaatataacactgggcaactcttcgggttagatggtataaaagcagataatccaataaaagcaaagcaagggagttcagatgcttcaaattattagaggcaaacttgtcatttttttaattaccctttgtttatttgttgtttaccttgggtttgataacaattcaaattctgacatcgtattttatggacataaaacaccaaagagcgttgagatatatctttctgaaaaaaatattatttataaaataattaatgaccaaaaaattagtagagggaatggtcattttataagtataatggttaataattacaggacgcactgtggagtggttgatataaatcttaattttttcaatgatattctttatagcgtgcgattaaaaaacattagtaaactggagaatatggagttctgcgctacaaaacaacgggtgtattttagtgataaaaacaagaaggctagttataaaataattaattatggagactattatgatgttgattattatgataacaatttgaaaaatgaagtttttgactggattggtaaatggtcataatgaacaacaccagaaagagaaaaatataaaatacatacagaaagacatgagagcaagggacggggcagggcaagatcatgaaaattgtgatgtaaatcacgattttcatctttgctttaacgcctacaggtgatcaaaatttaacctttggaataactaaaaagataaaaaaggacgccaggtgagtattcaaagtttgcttgattatatttcagtgacccctgatatacgacaacaaggaaaggttaaacataaattatctgctattttgtttctcaccgtatgtgcagtaattgcaggtgccgatgagtggcaggaaattgaagattttggacatgaaagacttgaatggctaaagaaatatggtgattttgataatggcattccggtcgatgacaccattgcacgcgttgtgagtaacattgacagtttggcctttgaaaagatgtttattgaatggatgcaggagtgccatgaaatcactgatggtgaaattatagcaatagatggaaagaccataagaggctcctttgataagggaaaaagaaaaggagcaatccatatggtgagtgcattctcgaacgaaaatggtgttgtactggggcaggtgaaaacggaagccaaaagtaatgagattacagccattccagagttgcttaacctactgtatttaaagaaaaatttgataaccattgatgctatgggctgtcagaaagatatcgcttcgaagatcaaagataaaaaagcagattatcttctggcagtaaaaggcaatcaggggaaattacatcatgcattcgaggaaaaatttcctgtaaatgtgttttctaattataaaggcgattcgtttagtacgcaggagataagtcatggaagaaaagaaacacgtttgcatattgtcagtaacgtaacgcctgaacttttgtgattttgaattcgaatggaagggattaaaaaagctttgtgtagcattgtcattcaggcagaagaaagaagataaatcagcagaaggtgtaagcatccgatattatatttcatcaaaggatatggatgctaaagaatttgcacatgctatcagagcgcactggctgatcgagcacagtcttcattgggtgttagatgtaaaaatgaatgaagatgccagccggataagaagaggaaacgcagcctaaataatatctggaataaagaagatggcactgaatttattaagagattgcaaagacattaagggtgaagaggaaaagaaagaaggctgcgttaaacacagggaaagatcatcagaagttcactttttgtactaaacaattcgcattttatgtttaaaaattgagatattccttattacctaaagctgttttttattgcttacacatgatcaaatactccttacataattaaggagaacaaaatggaacttaaaaaattgatgggacatatttctattatccccgattacagacaagcctggaaaatggaacataagttatcggatattctactgttgactatttgtgccgttatttctggtgcagaaggctgggaagatatagaggattttggggaaacacatcccgattttttgaagcaatatggtgattttgaaaatggtattcctgttcacgacaccattgccagagttgtatcctgtatcagtcctgcaaaatttcacgagtgctttattaactggatgcgtgactgccattcttcagatgataaagacgtcattgcaattgatggaaaaacgctccggcattcttatgataagagtcgccgcaggggagcgattcatgtcattagtgcgttctcaacaatgcacagtctggtcatcggacagatcaagacggatgagaaatctaatgagattacagctatcccagaacttcttaacatgctggatattaaaggaaaaatcatcacaactgatgcgatgggttgccagaaagatattgcagagaagatacaaaaacagggaggtgattatttattcgcggtaaaaggaaaccaggggcggctaaataaagcctttgaggaaaaatttccgctgaaagaattaaataatccagcgcatgacagttacgcaatgagtgaaaagagtcacggcagagaagaaatccgtcttcatattgtttgcgatgtccctgatgaacttattgatttcacgtttgaatggaaagggctgaagaaattatgcgtggcagtctcctttcggtccataatagcagaacaaaagaaagagctcgaaatgacggtcagatattatatcagttctgctgatttaaccgcagagaagttcgccacagcaatccgaaaccactggcatgtggagaataagctgcactggcgtctggacgtggtaatgaatgaagacgactgcaaaataagaagaggaaatgcagcagaattattttcagggatacggcacattgctattaatattttgacgaatgataaggtattcaaggcagggttaagacgtaagatgcgaaaagcagccatggacagaaactacctggcgtcagtccttacggggagcgggctttcgtaatcttgccctgggcattattgtcgtataaacgctttaccggacacatgacattcacaatgtgtgttaattttactgacatctttcaaaaggagcgtaatcatgccgcacatcgacattaaatgttttccgcgtgaactggacgaacaacaaaaagcagcacttgctgcagatattaccgacgttattattcgtcatctgaacagtaaagacagttcgataagcattgctctacagcagattcaaccagaatcttggcaagctatctgggatgccgaaatcgcgccccaaatggaggctttgataaagaaacctggttatagcatgaatgcttaacccgccgtaacacgcttgccgctggtaacaaacgtcccagcacctaaatgatgcaacgtattgagcttatcatcatcaaactgccagcggccttcgacaaatacccgtgcgtctgccgctgctgatactacttcgccaaacagcgtgtcgtattcttcttgcgcagaagtcgcaggtagcaatcgacactccatccacgccagacatttttcctcgaccagaggcaaaccaaataccgggcctctcacaaccggaatgccatagcaattaaatttatcttcatcacgccccgacacacttcccaccgcccacgtccagttagttgctgcaacgcccgggataacgatgccaaatttaccgttatgttcaatcaactccctggtccatgtcgatttatctaccacaatcgccacgcgtggaggttcaaactccaccggcattgaccaggctgcagccataatgttacgccgctgggattgctcatcgaaactggtgatcaagaccgttgggccatgatttaacagacggctggcatggtgtaattctatggggatgaatcggctcatggtatcgcctcgcgaagaaggtttttttaagcgtagtccgtaacgcaataagtaacgaaattaacgggattggcgatttgcgaacgtgatgcatgtccgcgatcgcacaaaatagccggtgcggcgtctattccaggttataagttgagaaaaccactaagggaaacgcctgatgacgcccattctgaatcactattttgcccgtattaactggtcgggagctgctgcggtcaatattgatacgcttcgtgcattgcacctgaaacacaattgcaccattccgtttgaaaacctcgacgttttgctgccgagggaaatacagcttgataatcaatcgccggaagagaaactggtgatagcccgtcgtggcggttactgttttgagcagaatggcgtgtttgagcgggtgttacgcgagctggggtttaacgttcgcagcttgttagggcgcgtagtgttatcaaatccgccagcattaccgccgcgcacccatcgtttgctgttggtggaactggaagaggaaaaatggattgctgatgtcggtttcggtgggcagacgctaaccgcgccgattcgtttagtttccgatctcgtgcagaccacgccacacggagagtatcggttgttgcaggagggtgatgattgggtgttgcagtttaatcatcatcagcattggcagtcgatgtaccgttttgatctctgcgagcagcaacaaagcgattatgtgatgggcaatttctggtcggcgcactggccgcagtcgcattttcgccatcatttgctgatgtgccgccatttgccggacggcggcaagctgacactgaccaattttcattttacccattatgaaaatgggcacgcggtggagcagcgaaatctaccggatgtggcgtcattatatgctgtgatgcaagaacagtttggtctgggcgtggatgatgcgaaacatggctttaccgtggatgagttagcgctggtgatggcggcgtttgatacgcacccggaggcgggaaaataatttatgtcaggttgccggatgcggcgtaaacgccttatccggcatacattagcccggttgtagacctgacaggcgaagcgcatcagacaacggtttcagagttcaattgcccattcggcatgaaacaaaatcaccgctgtgcctgaaatggtgactttttccggttggttatcacgaattgtcaccgtcacttcaatcataccgtcacgccccaatgcgcgcccctgatggcctttaacacgcaacacgttgccatcgtggggcaatacgttgtgatgtaccaaccatgcacccatcgggccattggcattgccagtcaccggatcttccacaataccaatcgcaggcgagaacatgcgaccatcggtttcgtttttgcctgggcggatctggaacgggaagaaaccattgcagccaatctttttgctgatagcggtcagcgcattaaggtcaggcgaaagggcgtcgatatccacttccggtttcagtgggatcatcacttttgagtgtcctgttgttgccacctgaattggcaagcctggcagaatatcgtcctcagtgagatgaagcgcgttgataatcgccgcacgtgtttcaccttccagcggtggctcaaagcccggcgtaccttgttccagcgaaatacgataatcatcgttgtgcttttcgatagtcacgcgatgttttcctgccagcgatgtttgccagatcgtgcaatttcctaaacctaacaccttcgcacgtacatagtgcgcagctactgtcgcgtgaccgcaaatcggcacttcaaccgttggcgtaaagtagcggatgcgcacatcgctgtcgtcgctgtgcagcagaaaagcagtttccgaatggcctaactcgcgggcgataagctgcatttgcgcttcgctaagattatcggcggggaaaacaacaccggcagaattgccgcgaaacggttgtgaggtaaaagcatcgacgtggtacacctgcggtttcattaacgttctcctgtgactggagaactatcatagcctgcaagtggccggagagcgaagggctatccggccagggtgaaattatcgccgcgaacgcacaatttgatatcgacgagtaaagtactcaaacggcgcgctccacacatgcaccagtcgggtgaacgggaagagcaggaagatggtcattcccaacaccagatgcaggcggaagacgaacgctacgccgttgagcatctctgacgatccaccacggaaagtgacaatgctttgcgcccaacccaccagcttcatcatttcgctaccatcaggatactgtgctgaaaacggtatggtacttagccccaacagacactggatcagcaaaatgctcatgatgatgatatccggcgtagtggaagtggcacgcacgcgctgatttgtcagcctgcgccacagcagtcctgcgccgccaatcaacgtcaacacaccgcaaataccgccgagcaccatcgccatgagttgtttcgctgccactggcaaaaaccacgcgtacatccagtgcggcgttaacatgccgaacaagtgcccgaagaaaatccccaaaatgccgatatggaacagattcgaccatatcaccatcccgcgtttatcgagcatttgacttgaggaggcgcgccaggtgtactgcccgtagtcgtagcgcagccagctgccgaggaaaaacaccgtcgcacaaatgtacgggtagatatcgtaaaaaaagacgttcagatactgaatcatttcccacctcccgcactgatgtcgacatattgcggcgcgacatcctggctaaagcgtcgctgatattgattaagcggcgagctgtcacacgccgtggcgttatcttcaataaacttcacctgttcctcttcccacactgcatcaagcgcctggcgggtgtcatcgcgctcttcgctgtttacttgttttgtgacactgtcacttgaaagggagcttcccgccagttgcagcagagcatcaaacaacgcgtaccacggtgcctcgcgttgttttaagcgaccgccaagcagggcgaggatcggcgcaacattgagcaatccttctttcgcctgatcgtcaggcagtacgcttaaatactccagatacagcggtagataatcgggcagttcccgacaatccagctgcaggccgaccttttcatactccgccagcaggtccaccattgcctggccgcgatcgcgggactcggcatgaacatgttcgaacagcagcagcgacgtggtgcgcccgcggtcaaacacttcgcaccattcggcctgtttatccagcagcggcgcgttaagcaggttgtgggtgaaatccgtaagcatcggcgcgtcgcggcggatcaacgccagcgcgtcctccttgcattcccacaacagctcgtccggatactccatcaacaggccgatcactttgaggatctgcattattcgccctccgctttgtcgcgcacttcggtgatgttgatggcatcgatacggctactgttgaacaggttgaatttactgtccgaaccgtggcaaccgtcgccaaaggtaaaaccgcagccgttgcgttctgcgaaggcatcgcccgccatttcccgatggctggtcgggataacaaaacgatcttcatagttggcaatggcgagatagcgatacatctcttcgacctgggcgacgctcaggcctacttcgtcgatggcacgagtatcagtaacgccttccacggtttgtgaacgcatatagtggcgcatcgccatcatccgtttcagcgcccgcagtaccggaccggtatcgccggcactcaacatattggcgagatattgcaccggaatacgcaggctttcgatggcgggcagcacgccttcgcttttcggcaaaccgcccgcatctgcgtaggactgaatcggtgacagcggaggaacgtaccagaccatcggcagggtgcggtattcagggtgcaacggtagtgccagtttccagtccatcgccattttgtagactggcgaacgctgggcagcgtcaatcacattttgtggaataccttgtttcagggcttcctcgatcactgagggatcgtgtggatcgaggaacacttcgcactggcgttcatagaggtcaacttcgcgctcggtgctcgccgcttcctcgatgcggtcggcgtcgtaaagcagcacgcccagataccggatgcgacccacgcaggtttctgagcacacggtcggttgaccggactcaattcgtgggtaacagaagatgcatttttctgacttgccgcttttccagttgaagtagatttttttgtacggacaaccgcttatgcacaaacgccagccacggcatttatcctgatcaatcagcacaatgccgtcttcttcgcgtttgtagatagcgccgcttgggcaggtcgccacgcagctgggattgaggcagtgttcgcacaggcgcggcaggtacatcatgaaggtgttttcaaactgcccgtacatctccttttgcatggcctcgaagttgcggtcgcgggcacgtttttcgaactcaccgcccagcagttcttcccagtttggcccccagatcactttgtccatccgtttgccgtcaatcagtgaacgcgggcgagcagtaggaatatgtttgccttccggtgcgctatgcaaatgttcgtagtcgaaggtgaaaggttcgtagtaatcatcaatctgcggcaccaccgggttggcgaagattttggttattacgcccatcttgttgcccagacgcgggcgtatcttgccattcacatcacgcacccagccgccttgccactcttcctgatcttcccagtttttcggataaccaatgcccggtttggtttcgacgttgttaaaccatgcgtactccatgccttcgcgcccggtccagacgtttttacaggtcaccgaacaggtatggcagccgatacatttgtcgaggttaagcaccatgccgacttgtgaacggattttcattttttcgcctcctgtacctgatcgcgaccttcatcatccagccagttaacgttcttcatcttgcggatcatgatgaactcatcgcggttcgatccgacggtgccgtagtagttaaagccccaggccagctgcgcgtaaccgccaatcatatgcgttggtttcgggcaaacgcgggtaaccgagttatgaatgccgccgcgcatgccagttacttccgaaccaggaatattcataatgcgttcctgggcgtgatacatcatggtcatgcccggcggtacacgttggctgaccaccgcgcgggcagtcagcgcgccgttggcgttgaatacttccacccagtcgttatcgacaatggtcagttctcgggcatctgtttcgctgatccagacaatcggtccaccgcgagagagcgtcagcattagcaggttttcactgtaggttgagtgaatgccccatttctggtgcggcgtcaggaagttaagtgctttttccgggaagccgtttggcggtatctggcgcatctcactgacgctacgggtgtcgataggcgggcgataagccaccaggctttcaccaaaagcacgcatccacggatgatcctgatagagctgctggcgtcccgacagcgtgcgccacggaattaactcatgaacgttggtgtatcccgcgttataggagacgtgatcgctttccagaccggaccaggtggggctggagataattttacgcggctgcgcctgaatatcgcgaaagcgaatcttctcgtcctctttgtgcagcgccagatgggtatgttcgcgcccggtgatctcgcccagcgcctgccacgctttgactgcaacatgaccgttggtttccggtgccagtgccagaatcacttctgaagcgtcaatggcggtgtcaatcagcggacgcccctgtgccgggccatcacgcttggtgtaattgagtttgccgaggaaatcgatttcatcctgggtattccacgaaatccctttaccgccattgccaagtttgtccatcaatggcccgagcgaggtaaagcgttcatacgtagcagggtagtcgcgctccaccgccacaatattcggcgcggttttgcctggaatcagatcgcattcgcctttgcgccagtcgagcacttcacacggctgtgagagctctgccggagagtcatgcagtaggggttgtaataccacgtcggtttctttgccaagatgacccacgcacacttgcgaaaatgctttggcgatacctttgtagatttcccagtcgctgcgtgattcccacgccggatcgaccgccgcagaaagcggatgaataaacggatgcatatccgaggtgttcatatcgtctttttcgtaccaggtggcggtgggcagaacgatatcggagaacaggcaggtactggacatgcggaagtcgagcgtcaccagcaggtcgagcttgccttcaatcgctgcagtttgccactcgacttcttccggtttgatcccgtcgctggcaccgagttcctcgccctgaatcccgctttcggtccccagcagatacttctgcatatactcgtggcctttgccggaggagccaagcaggttagagcgccagacaaacaaattacgcggatgattgctgctgctatctggttgttcgcaggccatacgtaaatcgcccgatttcagcgcctgggcggtaaattctgtgggggataatccggccttgtcggcttcagctttaatcccgagcgggttacgccccagctgcggcgcagaaggtagccagcccatacgttcggcgcgaacgttgaaatcaatcagatgaccgctgtacttactggcatcggcgagcggtgaaagtaactcctgagcagagactttttcatagcgccattggctggaatgattgtagaaaaacgaggtgctgttcatttggcgcggtggtcggttccagtcgagcgcaaaggccagtggcaaccagccggtttgtgggcgcagtttttcctggccgacatagtgtgcccagccgccaccgctttgcccgacacaaccgcagaagatcagcatattgatcatcccgcggtagttcatgtccatgtgataccagtggttaacacctgcgccgaggataatcatcgagcgcccatgcgttttatgggcggtatcggcaaattcacgggcgatggtttcaatatactggcgcggcacgccggtaatttgctcaccccaggctggggtgtacggtttgatttcagcgtaatctttcgcactgttttcatcttccagcccgcgatcgaggccgtaattcgccagtaccaaatcataaacgctgaccaccggacaggtgttgccatcgactaacgtcaggtttttaacgggcaattggcgcaccagcaccggattgtgttttacgctgcgaaaatgcggattttcaatgccgccaaagtaggggaaggccacgcctgcaacagcgtcatgttgaccgagcagggttaacgacaattcggtttccgtaccggcggcaatggattccagattccatttgcctttttctccccagcggaaaccaatcgaaccgttcggcactaccaattcacctgcggtattaactgctacggttttccactgcggattgttgctttcgcccagtccatccaccaggtcagatgcgcggatcatgcgcccgggaacgtagctaccatcgtcgcgaggctccagcattaccagcatcggcatgtcgctgtagcggcggcagtagttgataaagtagtcgctgggattatcgagatgaaactcttttaaaatcacatggcccattgccatcgccagggcgctatcagtgccttgtttcggtgccagccactggtcgcacaatttggccacttcagagtagtcaggggtaatggcgatggttttagtgcctttgtagcgtacttcggtaaagaagtgggcgtccggcgtacgtgtctgcggtacgttagacccccaggcgatgatgtagctggagttataccagtcggcagattccggtacgtcggtttgctcgccccaggtcatcggcgaggcgggcggcaggtcgcaataccagtcgtagaaacttaaacaggtgccgccaagcagcgacagataacgcgttccggcggcgtaagaaaccatcgacatcgccgggatcggcgagaaaccggcaacgcgatccgggccgtaggttttgatggtccagacgttagcggcggcaatcagctggtttagttcctgccagttggagcggataaacccgccgcgcccacgcacttgtttgtagctcaggcacttttgcggatcgttcataatcgatgcccacgccagtaccggatcgctgtgttgcttgagggcttcgcgccacagttcaatcagtcgtttacgaatgagcgggtatttcaggcggttagcgctgtaaagataccaggagtaacttgcgccacgcgggcagccgcgaggttcatgattgggcaggtcagggcgagtgcgcgggtagtcggtctgttggatttcccaggtcaccagaccatttttaacgtagattttccagctacaggagcctgtacagttaacaccgtgggtggaacgcacgattttgtcgaactgccaacgctggcgatagctgtcctcccagtcgcggttgctatgcatcacctgtccgtgaccatcggcaaaggtttcgcccttttgtttgaagtagcgaaagcgatccaaaagtttactcatgacatgactcctgctccaggaatgaattgggatctgatgccttgtcggatgcgacacggttgtacatcaggcatcgatctcttatttttggctgaacttccgccgaccataaaccagccaggtcagcagcacacaaacgatgtagaagattaaaaacactttcatcgcgccgaccggagagccggtcatattgagcgacatgccaaacgcctgcggaataaaaaagccgcccactgcgccaatggctgagataaagcccagagccgccgccgtttcggtgacggcttctttatgagcttgctcatcactaccgcctttcatctttacccgataaatggttatctggcgaaagatgacggcgatcatctggaaagtagaaccacttcccagacccgcagtcagaaacagccccataaatacggcgtaaaaggcgatgaaattaccggagcctgtgcccggtaaggtaaggaacagcagggcactgaaaatcgccataaaaataaagttgatcaacgtcacccgcacgccgccgaacttatcggaaatagcaccaccaaccgaccgcgcgatggcaccgataaatgggccaaagaacgccaggcgcagaatattcacatccgggaactgggtttttgccagcatggcaaaacccgcagaaaaaccgataaacgaaccgaaggtggcaaggtaaagcaggctcagcagccagagatgcaggcgttgtaagacagggagctggtcggcaattgaggcgcgtgaactggcgatatcattcatccctgaccatgcggcgatcgtggcaatcgccagtagcggtacccaaatccatgcggcattcgccagcgacatcaccgaaccgtcggcctgcggtacgccattgacgccgagaaaggcaaatacaggtacaaaaatgaccagcggtgcaaccagctgcattacacttacacctaagtttcctaatccgccattaatcccaagagcgctcccttgtttggcttttggaaagaagaaactgatattgcccatgctcgaagcaaagtttgcacctgcaaaaccgcatagcaaagcgataacgataaatatcccaaaaggagtattcggattttgcacggcaattccgagccagacgcaaggaataatcaggattgcagtactaaaaaccgtccatcggcgtccaccgaatataggcaccataaaggagtagggaacacgcaataatgcgccagaaacggagggtaatgcggttaataaaaagagttgatcggtagtaaaattaaaaccgattttattgagattaacggtaactgcgctaaatagcatccagacacagaaggcaagaagtagacaactgactgatatccagagatttcttcgagcaatatgttttcctttattttcccagaaggccggattttctggtttccagtcgcgcaaaagataacgactatttttctcattttgcagtgccatattgttcctcacatgcacacattggtaatgaaaaaaagacaaaacacgaggtaaggcgcaatagccagttattagaattaaggatgaattgggtgaagtgctgattgaaagaatagataagaaagcgtaaccgcgggggcagaatggggattaagtagccagatatgtgttactaaatgtaactaacaagctaaccttcaaacggggttaatctttgaacgtatgtcatgtttcaacccttcagatcgtgaatctaaagggttacatattaactatattatcaacaagaccagacacttatagaattagtgatgatttattcactaaaaaggccatgaactggaggaaaacgatctgtccagaaggtctatcggttcctctcttattgcctgattgtaataatcgttattacagtaagtattgtttatttcatctaaggtcatgtttttaacttttatattcatctggtttacaacttcctctgtcttgtaagtgtgtatattatatggggtatatgcttttttaataggatagtgaaacaattcgttatccacatctattccgtcagagtgaacttcaaatgcaccaggcgaaagaattgccaggccagtattaagcttaagtgctggggaaaacaaattaaataacatgagctgcatagtagggcaattgttcttcccagaaacatttaaaaaatttaagttttgctctgttttattatggggaataaagttccaatatcggatgtattattagtatcaatgtgggttattttattattgtccagtcttaaacttttgatagatggaagataagtcaggaaatcaagatttatatatttcaactggttgttagcagcgtttaatgtctgaacattgcagaagttgctatagaatattttaatttcagaaagcaaattgttgttaataagtaacgtattcaagttgggaaataagtcattgtgtaaacttgttagtttattatgggatagatccagcagtaagagttcatttttattacctgcaacaatatcagttaattgattatggctgagattcaggtattgcagccattcgcaagattctaattgcacaaactctagttgattatgtgccgcactaaaataagtaactgatgaaagcctatctatatcaatatttctgagagcattattattcatagatatatgtgtaatacttacatttctgccttgaggaaaatttattgactcaagagcattactattcagacttagctttacgagtctatcgtagttggttgcatcaaaatgtgtgaattggttattatcaagattgatagatgtgaagttttgcagccctggtggttgagtggttaaattaagtcctgataaatcaatggtcacttcattagtgtcatcaattatatttcttactgcagtccagtactgcatttgtgcaagtggatcattgttgatgccgttaactaatacatgccaaagatgttttgatgatattagttgatcaatgtcattggttggcagtaaattgttattgcttaagtttaaatattccagttttgtagtgtttttggcgtttaaatgtgcaatatggttgtcgtttaaagtgattgttttcatcctgggatgattgtgtaatataaggtcagtgatcatattgtgatgggcacttaactcaatcagagattcttgccgcgcgagccgttggcttcatcgttatagcctttaaaatcatattcccagtgaccaaaaccaatcatttgatcattgatttgcgtttctcctttaaagccgagacgggcataagttttatcaccatcgtcacgcttatcatcagtaaaataacgtagagcggtaaccttgccataaaggtcgagtttattaccatccttgttatagacttcggcagcgtgtgctacgttcgcagctaacaaaccagttacaaccaccgcaactatttttaatttcatttaacagaatccttttaattatcgttaaacgtattttctaaacgaattttaaacggcgtcatttataaatgacatactgtttttaaaatagaatggtgattaaaaacaatgagaaaaatagatgaaataatattatttatcgatatgtgatcgaagtcgaaatgagatataaggtgaattactggtatttgaaatttatttttttaatattgtcggaatttatctgattaactaccgggccgtagacccggcagttattttaaccacgacgtgtcgccagccagcagagcagggaaccgccgcagaccatcagcgcgccttgccagaacgagaacgacagcggggcgctgagcagcacggctgcaagcgctgaggaaagtacaggcgtaaaatacgaacctaccgccataatggtgacattgccatgcaatataccgacattccatgcagcataagcaaatcctaaggtaaatgccgcagagatgagtttaatcatgacgggcgtgctaaatatcatttctggttgtggcgtaagaaaatagtaaacccacagacttgctcccgttagcaggacaaaaacggtaattccattaaatccgcgtgcgtatttattcgttactgtgcaataggctgcccagataaacgcaccaatgaacgccaggaaataactcaatgggctggtggtgatattattgatgatttcatcataatgtaacccattgtcaccgcctaacacccaacagacgccgacgagggctaataataatccaggtacaatcaaccagttggttttctgaccattaaacagaatggcaaagagaattgtcaggctgggccacagatagttcaccatacccacttcaatcgcctgatgatgggtcgccgcataccctaaggaaagcgccagacagatttcatagctgacgaataacagactcccggcgagtaaatagcctttcgggatttgccgaatacgcggaaatccaaccgtgaagattaacagcagcccgcttaatgaatagatagcagctgcgccgccgaccgggccgagcccctcactgacaccgcgaatcaatcctaccatcgtgctccacaggacgatcgctatcagccctatgagcgttgctttttgtcgtgtcatgctcgctgttttgtctctcttgccgttaaaaattaagctgaattttatagcatttttttaactggcctgtcaggcagtggtgcgtttttctaccgctattgaggtaggtcaatttgcgaaggcggattattttgtggcaaacagatgttctttttgatttcgcgcaaaaagattcagaattttactgttagtttcctcgcgcagtaatacccctgaaaaaagaggaaagcaatggacgtcagtcgcagacaattttttaaaatctgcgcgggcggtatggctggaacaacagtagcggcattgggctttgccccgaagcaagcactggctcaggcgcgaaactacaaattattacgcgctaaagagatccgtaacacctgcacatactgttccgtaggttgcgggctattgatgtatagcctgggtgatggcgcaaaaaacgccagagaagcgatttatcacattgaaggtgacccggatcatccggtaagccgtggtgcgctgtgcccgaaaggggccggtttgctggattacgtcaacagtgaaaaccgtctgcgctacccggaatatcgtgcgccaggttctgacaaatggcagcgcattagctgggaagaagcattctcccgtattgcgaagctgatgaaagctgaccgtgacgctaactttattgaaaagaacgagcagggcgtaacggtaaaccgttggctttctaccggtatgctgtgtgcctccggtgccagcaacgaaaccgggatgctgacccagaaatttgcccgctccctcgggatgctggcggtagacaaccaggcgcgcgtctgacacggaccaacggtagcaagtcttgctccaacatttggtcgcggtgcgatgaccaaccactgggtggatatcaaaaacgctaacgtcgtgatggtgatgggcggtaacgctgctgaagcgcatcccgtcggtttccgctgggcgatggaagcgaaaaacaacaacgacgcaaccttgatcgttgtcgatccccgttttacgcgtaccgcttctgtggcggatatttacgcgcctattcgttccggtacggacattacgttcctgtctggcgttttgcgctacctgatcgaaaacaacaaaatcaacgccgaatacgttaagcattacaccaacgccagcctgctggtgcgtgatgattttgctttcgaagacggtctgttcagcggctacgacgctgaaaaacgtcaatacgataaatcgtcctggaactatcagctcgatgaaaacggctatgcgaaacgcgatgaaacactgactcatccgcgctgtgtgtggaacctgctgaaagagcacgtttcccgctacacgccggacgtcgttgaaaacatctgcggtacgccaaaagccgacttcctgaaagtgtgtgaagtgctggcctccaccagcgcaccggatcgcacaaccaccttcctgtacgcgctgggctggacgcagcacactgtgggtgcgcagaacatccgtactatggcgatgatccagttgctgctcggtaacatgggtatggccggtggcggcgtgaacgcattgcgtggtcactccaacattcagggcttgactgacttaggcctgctctctaccagcctgccaggttatctgacgctgccgtcagaaaaacaggttgatttgcagtcgtatctggaagcgaacacgccgaaagcgacgctggctgatcaggtgaactactggagcaactatccgaagttcttcgttagcctgatgaaatctttctatggcgatgccgcgcagaaagagaacaactggggctatgactggctgccgaagtgggaccagacctacgacgtcatcaagtatttcaacatgatggatgaaggcaaagtcaccggttatttctgccagggctttaacccggttgcgtccttcccggacaaaaacaaagtggtgagctgcctgagcaagctgaagtacatggtggttatcgatccgctggtgactgaaacctctaccttctggcagaaccacggtgagtcgaacgatgtcgatccggcgtctattcagactgaagtattccgtctgccttcgacctgctttgctgaagaagatggttctatcgctaactccggtcgctggttgcagtggcactggaaaggtcaggacgcgccgggcgaagcgcgtaacgacggtgaaattctggcgggtatctaccatcatctgcgcgagctgtaccagtccgaaggtggtaaaggcgtagaaccgctgatgaagatgagctggaactacaagcagccgcacgaaccgcaatctgacgaagtggctaaagagaacaacggctacgcgctggaagatctctatgacgctaatggcgtgcttattgcgaagaaaggtc

(The sequence listing continues in the following parts.)
